(19) United States
(12) Patent Application Publication
(10) Pub. No.: US 2003/0152926 A1
(43) Pub. Date: Aug. 14, 2003

(54) Novel methods of diagnosis of angiogenesis, compositions and methods of screening for angiogenesis modulators

(75) Inventors: Richard Murray, Cupertino, CA (US); Richard Glynne, Palo Alto, CA (US); Susan R. Watson, El Cerrito, CA (US)

Correspondence Address: TOWNSEND AND TOWNSEND AND CREW, LLP, TWO EMBARCADERO CENTER, EIGHTH FLOOR, SAN FRANCISCO, CA, 94111-3834, US

(73) Assignee: Eos Biotechnology, Inc., South San Francisco, CA (US)

(21) Appl. No.: 10/021,660

(22) Filed: Dec. 6, 2001

Related U.S. Application Data
(63) Continuation of application No. 09/784,356, filed on Feb. 14, 2001.
(63) Continuation-in-part of application No. 09/637,977, filed on Aug. 11, 2000.
(60) Provisional application No. 60/148,425, filed on Aug. 11, 1999.

(51) Int. Cl. C12Q 1/68; C07H 21/04; C12P 19/34

(52) U.S. Cl. 435/6; 536/23.1; 435/91.2

(57) ABSTRACT

Described herein are methods and compositions that can be used for diagnosis and treatment of angiogenic phenotypes and angiogenesis-associated diseases. Also described herein are methods that can be used to identify modulators of angiogenesis.

### CROSS-REFERENCES TO RELATED APPLICATIONS

[0001] The present application is a continuation-in-part (CIP) of co-pending U.S. patent application “Novel Methods Of Diagnosis Of Angiogenesis, Compositions And Methods Of Screening For Angiogenesis Modulators”, Attorney Docket No. A651 10-1, filed on Aug. 11, 2000, which claims the benefit of priority to U.S. Ser. No. 60/148,425 filed Aug. 11, 1999, both of which are incorporated herein by reference.

### FIELD OF THE INVENTION

[0002] The invention relates to the identification of nucleic acid and protein expression profiles and nucleic acids, products, and antibodies thereto that are involved in angiogenesis; and to the use of such expression profiles and compositions in diagnosis and therapy of angiogenesis. The invention further relates to methods for identifying and using agents and/or targets that modulate angiogenesis.

### BACKGROUND OF THE INVENTION

[0003] Both vasculogenesis, the development of an interactive vascular system comprising arteries and veins, and angiogenesis, the generation of new blood vessels, play a role in embryonic development. In contrast, angiogenesis is limited in a normal adult to the placenta, ovary, endometrium and sites of wound healing. However, angiogenesis, or its absence, plays an important role in the maintenance of a variety of pathological states. Some of these states are characterized by neovascularization, e.g., cancer, diabetic retinopathy, glaucoma, and age related macular degeneration. Others, e.g., stroke, infertility, heart disease, ulcers, and scleroderma, are diseases of angiogenic insufficiency. Angiogenesis has a number of stages (see, e.g., Folkman, J. Natl Cancer Inst. 82.4-6, 1990; Firestein, J Clin Invest.103:3-4, 1999; Koch, Arthritis Rheum.41:951-62, 1998; Carter, Oncologist 5(Suppl 1):51-4, 2000; Browder et al., Cancer Res. 60:1878-86, 2000; and Zhu and Witte, Invest New Drugs 17:195-212, 1999). The early stages of angiogenesis include endothelial cell protease production, migration of cells, and proliferation. The early stages also appear to require some growth factors, with VEGF, TGF-A, angiostatin, and selected chemokines all putatively playing a role. Later stages of angiogenesis include population of the vessels with mural cells (pericytes or smooth muscle cells), basement membrane production, and the induction of vessel bed specializations. The final stages of vessel formation include what is known as “remodeling”, wherein a forming vasculature becomes a stable, mature vessel bed. Thus, the process is highly dynamic, often requiring coordinated spatial and temporal waves of gene expression.

[0004] Conversely, the complex process may be subject to disruption by interfering with one or more critical steps. Thus, the lack of understanding of the dynamics of angiogenesis prevents therapeutic intervention in serious diseases such as those indicated. It is an object of the invention to provide methods that can be used to screen compounds for the ability to modulate angiogenesis. Additionally, it is an object to provide molecular targets for therapeutic intervention in disease states which either have an undesirable excess or a deficit in angiogenesis. The present invention provides solutions to both.

### SUMMARY OF THE INVENTION

[0005] The present invention provides compositions and methods for detecting or modulating angiogenesis associated sequences.

[0006] In one aspect, the invention provides a method of detecting an angiogenesis-associated transcript in a cell in a patient, the method comprising contacting a biological sample from the patient with a polynucleotide that selectively hybridized to a sequence at least 80% identical to a sequence as shown in Table 1. In one embodiment, the biological sample is a tissue sample. In another embodiment, the biological sample comprises isolated nucleic acids, which are often mRNA.

[0007] In another embodiment, the method further comprises the step of amplifying nucleic acids before the step of contacting the biological sample with the polynucleotide. Often, the polynucleotide comprises a sequence as shown in Table 1. The polynucleotide can be labeled, for example, with a fluorescent label and can be immobilized on a solid surface.

[0008] In other embodiments the patient is undergoing a therapeutic regimen to treat a disease associated with angiogenesis or the patient is suspected of having an angiogenesis-associated disorder.

[0009] In another aspect, the invention comprises an isolated nucleic acid molecule consisting of a polynucleotide sequence as shown in Table 1. The nucleic acid molecule can be labeled, for example, with a fluorescent label.

[0010] In other aspects, the invention provides an expression vector comprising an isolated nucleic acid molecule consisting of a polynucleotide sequence as shown in Table 1 or a host cell comprising the expression vector.

[0011] In another embodiment, the isolated nucleic acid molecule encodes a polypeptide having an amino acid sequence as shown in Table 2.

[0012] In another aspect, the invention provides an isolated polypeptide which is encoded by a nucleic acid molecule having polynucleotide sequence as shown in Table 1. In one embodiment, the isolated polypeptide has an amino acid sequence as shown in Table 2.

[0013] In another embodiment, the invention provides an antibody that specifically binds a polypeptide that has an amino acid sequence as shown in Table 2. The antibody can be conjugated to an effector component such as a fluorescent label, a toxin, or a radioisotope. In some embodiments, the antibody is an antibody fragment or a humanized antibody.

[0014] In another aspect, the invention provides a method of detecting a cell undergoing angiogenesis in a biological sample from a patient, the method comprising contacting the biological sample with an antibody that specifically binds to a polypeptide that has an amino acid sequence as shown in Table 2. In some embodiment, the antibody is further conjugated to an effector component, for example, a fluorescent label.

[0015] In another embodiment, the invention provides a method of detecting antibodies specific to angiogenesis in a patient, the method comprising contacting a biological sample from the patient with a polypeptide comprising a sequence as shown in Table 2.

[0016] The invention also provides a method of identifying a compound that modulates the activity of an angiogenesis-associated polypeptide, the method comprising the steps of: (i) contacting the compound with a polypeptide that comprises at least 80% identity to an amino acid sequence as shown in Table 2; and (ii) detecting an increase or a decrease in the activity of the polypeptide. In one embodiment, the polypeptide has an amino acid sequence as shown in Table 2. In another embodiment, the polypeptide is expressed in a cell.

[0017] The invention also provides a method of identifying a compound that modulates angiogenesis, the method comprising steps of: (i) contacting the compound with a cell undergoing angiogenesis; and (ii) detecting an increase or a decrease in the expression of a polypeptide sequence as shown in Table 2. In one embodiment, the detecting step comprises hybridizing a nucleic acid sample from the cell with a polynucleotide that selectively hybridizes to a sequence at least 80% identical to a sequence as shown in Table 1. In another embodiment, the method further comprises detecting an increase or decrease in the expression of a second sequence as shown in Table 2.

[0018] In another embodiment, the invention provides a method of inhibiting angiogenesis in a cell that expresses a polypeptide at least 80% identical to a sequence as shown in Table 2, the method comprising the step of contacting the cell with a therapeutically effective amount of an inhibitor of the polypeptide. In one embodiment, the polypeptide has an amino acid sequence shown in Table 2. In another embodiment, the inhibitor is an antibody.

[0019] In other embodiments, the invention provides a method of activating angiogenesis in a cell that expresses a polypeptide at least 80% identical to a sequence as shown in Table 2, the method comprising the step of contacting the cell with a therapeutically effective amount of an activator of the polypeptide. In one embodiment, the polypeptide has an amino acid sequence shown in Table 2.

[0020] Other aspects of the invention will become apparent to the skilled artisan by the following description of the invention.

[0021] Table 1 provides nucleotide sequence of genes that exhibit changes in expression levels as a function of time in tissue undergoing angiogenesis compared to tissue that is not.

[0022] Table 2 provides polypeptide sequence of proteins that exhibit changes in expression levels as a function of time in tissue undergoing angiogenesis compared to tissue that is not.

### DESCRIPTION OF THE SPECIFIC EMBODIMENTS

[0023] In accordance with the objects outlined above, the present invention provides novel methods for diagnosis and treatment of disorders associated with angiogenesis (sometimes referred to herein as angiogenesis disorders or AD), as well as methods for screening for compositions which modulate angiogenesis. By “disorder associated with angiogenesis” or “disease associated with angiogenesis” herein is meant a disease state which is marked by either an excess or a deficit of vessel development. Angiogenesis disorders asociated with increased angiogenesis include, but are not limited to, cancer and proliferative diabetic retinopathy. Pathological states for which it may be desirable to increase angiogenesis include stroke, heart disease, infertility, ulcers, and scleradoma. Also provided are methods for treating AD.

[0024] Definitions

[0025] The term “angiogenesis protein” or “angiogenesis polynucleotide” refers to nucleic acid and polypeptide polymorphic variants, alleles, mutants, and interspecies homologs that: (1) have an amino acid sequence that has greater than about 60% amino acid sequence identity, 65%, 70%, 75%, 80%, 85%, 90%, preferably 91%, 92%, 93%, 94%, 95%, 96%, 97%, 98% or 99% or greater amino acid sequence identity, preferably over a region of over a region of at least about 25, 50, 100, 200, 500, 1000, or more amino acids, to an angiogenesis protein sequence of Table 2; (2) bind to antibodies, e.g. polyclonal antibodies, raised against an immunogen comprising an amino acid sequence of Table 2, and conservatively modified variants thereof; (3) specifically hybridize under stringent hybridization conditions to an anti-sense strand corresponding to a nucleic acid sequence of Table 1 and conservatively modified variants thereof; (4) have a nucleic acid sequence that has greater than about 95%, preferably greater than about 96%, 97%, 98%, 99%, or higher nucleotide sequence identity, preferably over a region of at least about 25, 50, 100, 200, 500, 1000, or more nucleotides, to a sense sequence corresponding to one set out in Table 1. A polynucleotide or polypeptide sequence is typically from a mammal including, but not limited to, primate, e.g., human; rodent, e.g., rat, mouse, hamster; cow, pig, horse, sheep, or any mammal. An “angiogenesis polypeptide” and an “angiogenesis polynucleotide,” include both naturally occurring or recombinant.

[0026] A “full length” angiogenesis protein or nucleic acid refers to an agiogenesis polypeptide or polynucleotide sequence, or a variant thereof, that contains all of the elements normally contained in one or more naturally occurring, wild type angiogenesis polynucleotide or polypeptide sequences. The “full length” may be prior to, or after, various stages of post-translation processing.

[0027] “Biological sample” as used herein is a sample of biological tissue or fluid that contains nucleic acids or polypeptides, e.g., of an angiogenic protein. Such samples include, but are not limited to, tissue isolated from primates, e.g., humans, or rodents, e.g., mice, and rats. Biological samples may also include sections of tissues such as biopsy and autopsy samples, and frozen sections taken for histologic purposes. A biological sample is typically obtained from a eukaryotic organism, most preferably a mammal such as a primate e.g., chimpanzee or human; cow; dog; cat; a rodent, e.g., guinea pig, rat, mouse; rabbit; or a bird; reptile; or fish.

[0028] “Providing a biological sample” means to obtain a biological sample for use in methods described in this invention. Most often, this will be done by removing a sample of cells from an animal, but can also be accomplished by using previously isolated cells (e.g., isolated by another person, at another time, and/or for another purpose), or by performing the methods of the invention in vivo. Archival tissues, having treatment or outcome histroy, will be particularly useful.

[0029] The terms “identical” or percent “identity,” in the context of two or more nucleic acids or polypeptide sequences, refer to two or more sequences or subsequences that are the same or have a specified percentage of amino acid residues or nucleotides that are the same (i.e., about 70% identity, preferably 75%, 80%, 85%, 90%, 91%, 92%, 93%, 94%, 95%, 96%, 97%, 98%, 99%, or higher identity over a specified region (e.g., SEQ ID NOS:1-4), when compared and aligned for maximum correspondence over a comparison window or designated region) as measured using a BLAST or BLAST 2.0 sequence comparison algorithms with default parameters described below, or by manual alignment and visual inspection (see, e.g., NCBI web site http://www.ncbi.nlm.nih.gov/BLAST/ or the like). Such sequences are then said to be “substantially identical.” This definition also refers to, or may be applied to, the compliment of a test sequence. The definition also includes sequences that have deletions and/or additions, as well as those that have substitutions. As described below, the preferred algorithms can account for gaps and the like. Preferably, identity exists over a region that is at least about 25 amino acids or nucleotides in length, or more preferably over a region that is 50-100 amino acids or nucleotides in length.

[0030] For sequence comparison, typically one sequence acts as a reference sequence, to which test sequences are compared. When using a sequence comparison algorithm, test and reference sequences are entered into a computer, subsequence coordinates are designated, if necessary, and sequence algorithm program parameters are designated. Preferably, default program parameters can be used, or alternative parameters can be designated. The sequence comparison algorithm then calculates the percent sequence identities for the test sequences relative to the reference sequence, based on the program parameters.

[0031] A “comparison window”, as used herein, includes reference to a segment of any one of the number of contiguous positions selected from the group consisting of from 20 to 600, usually about 50 to about 200, more usually about 100 to about 150 in which a sequence may be compared to a reference sequence of the same number of contiguous positions after the two sequences are optimally aligned. Methods of alignment of sequences for comparison are well-known in the art. Optimal alignment of sequences for comparison can be conducted, e.g., by the local homology algorithm of Smith & Waterman, Adv. Appl. Math. 2:482 (1981), by the homology alignment algorithm of Needleman & Wunsch, J. Mol. Biol. 48:443 (1970), by the search for similarity method of Pearson & Lipman, Proc. Nat'l. Acad. Sci. USA 85:2444 (1988), by computerized implementations of these algorithms (GAP, BESTFIT, FASTA, and TFASTA in the Wisconsin Genetics Software Package, Genetics Computer Group, 575 Science Dr., Madison, Wis.), or by manual alignment and visual inspection (see, e.g., Current Protocols in Molecular Biology (Ausubel et al., eds. 1995 supplement)).

[0032] A preferred example of algorithm that is suitable for determining percent sequence identity and sequence similarity are the BLAST and BLAST 2.0 algorithms, which are described in Altschul et al., Nuc. Acids Res. 25:3389-3402 (1977) and Altschul et al., J. Mol. Biol. 215:403-410 (1990), respectively. BLAST and BLAST 2.0 are used, with the parameters described herein, to determine percent sequence identity for the nucleic acids and proteins of the invention. Software for performing BLAST analyses is publicly available through the National Center for Biotechnology Information (http://www.ncbi.nlm.nih.gov/). This algorithm involves first identifying high scoring sequence pairs (HSPs) by identifying short words of length W in the query sequence, which either match or satisfy some positive-valued threshold score T when aligned with a word of the same length in a database sequence. T is referred to as the neighborhood word score threshold (Altschul et al., supra). These initial neighborhood word hits act as seeds for initiating searches to find longer HSPs containing them. The word hits are extended in both directions along each sequence for as far as the cumulative alignment score can be increased. Cumulative scores are calculated using, for nucleotide sequences, the parameters M (reward score for a pair of matching residues; always >0) and N (penalty score for mismatching residues; always <0). For amino acid sequences, a scoring matrix is used to calculate the cumulative score. Extension of the word hits in each direction are halted when: the cumulative alignment score falls off by the quantity X from its maximum achieved value; the cumulative score goes to zero or below, due to the accumulation of one or more negative-scoring residue alignments; or the end of either sequence is reached. The BLAST algorithm parameters W, T, and X determine the sensitivity and speed of the alignment. The BLASTN program (for nucleotide sequences) uses as defaults a wordlength (W) of 11, an expectation (E) of 10, M=5, N=-4 and a comparison of both strands. For amino acid sequences, the BLASTN program uses as defaults a wordlength of 3, and expectation (E) of 10, and the BLOSUM62 scoring matrix (see Henikoff & Henikoff, Proc. Natl. Acad. Sci. USA 89:10915 (1989)) alignments (B) of 50, expectation (E) of 10, M=5, N=-4, and a comparison of both strands.

[0033] The BLAST algorithm also performs a statistical analysis of the similarity between two sequences (see, e.g., Karlin & Altschul, Proc. Nat'l. Acad. Sci. USA 90:5873-5787 (1993)). One measure of similarity provided by the BLAST algorithm is the smallest sum probability (P(N)), which provides an indication of the probability by which a match between two nucleotide or amino acid sequences would occur by chance. For example, a nucleic acid is considered similar to a reference sequence if the smallest sum probability in a comparison of the test nucleic acid to the reference nucleic acid is less than about 0.2, more preferably less than about 0.01, and most preferably less than about 0.001.

[0034] An indication that two nucleic acid sequences or polypeptides are substantially identical is that the polypeptide encoded by the first nucleic acid is immunologically cross reactive with the antibodies raised against the polypeptide encoded by the second nucleic acid, as described below. Thus, a polypeptide is typically substantially identical to a second polypeptide, for example, where the two peptides differ only by conservative substitutions. Another indication that two nucleic acid sequences are substantially identical is that the two molecules or their complements hybridize to each other under stringent conditions, as described below. Yet another indication that two nucleic acid sequences are substantially identical is that the same primers can be used to amplify the sequences.

[0035] A “host cell” is a naturally occurring cell or a transformed cell that contains an expression vector and supports the replication or expression of the expression vector. Host cells may be cultured cells, explants, cells in vivo, and the like. Host cells may be prokaryotic cells such as E. coli, or eukaryotic cells such as yeast, insect, amphibian, or mammalian cells such as CHO, HeLa, and the like (see, e.g., the American Type Culture Collection catalog or web site, www.atcc.org).

[0036] The terms “polypeptide,” “peptide” and “protein” are used interchangeably herein to refer to a polymer of amino acid residues. The terms apply to amino acid polymers in which one or more amino acid residue is an artificial chemical mimetic of a corresponding naturally occurring amino acid, as well as to naturally occurring amino acid polymers and non-naturally occurring amino acid polymer.

[0037] The term “amino acid” refers to naturally occurring and synthetic amino acids, as well as amino acid analogs and amino acid mimetics that function in a manner similar to the naturally occurring amino acids. Naturally occurring amino acids are those encoded by the genetic code, as well as those amino acids that are later modified, e.g., hydroxyproline, γ-carboxyglutamate, and O-phosphoserine. Amino acid analogs refers to compounds that have the same basic chemical structure as a naturally occurring amino acid, i.e., an a carbon that is bound to a hydrogen, a carboxyl group, an amino group, and an R group, e.g., homoserine, norleucine, methionine sulfoxide, methionine methyl sulfonium. Such analogs have modified R groups (e.g., norleucine) or modified peptide backbones, but retain the same basic chemical structure as a naturally occurring amino acid. Amino acid mimetics refers to chemical compounds that have a structure that is different from the general chemical structure of an amino acid, but that functions in a manner similar to a naturally occurring amino acid.

[0038] Amino acids may be referred to herein by either their commonly known three letter symbols or by the one-letter symbols recommended by the IUPAC-IUB Biochemical Nomenclature Commission. Nucleotides, likewise, may be referred to by their commonly accepted single-letter codes.

[0039] “Conservatively modified variants” applies to both amino acid and nucleic acid sequences. With respect to particular nucleic acid sequences, conservatively modified variants refers to those nucleic acids which encode identical or essentially identical amino acid sequences, or where the nucleic acid does not encode an amino acid sequence, to essentially identical sequences. Because of the degeneracy of the genetic code, a large number of functionally identical nucleic acids encode any given protein. For instance, the codons GCA, GCC, GCG and GCU all encode the amino acid alanine. Thus, at every position where an alanine is specified by a codon, the codon can be altered to any of the corresponding codons described without altering the encoded polypeptide. Such nucleic acid variations are “silent variations,” which are one species of conservatively modified variations. Every nucleic acid sequence herein which encodes a polypeptide also describes every possible silent variation of the nucleic acid. One of skill will recognize that each codon in a nucleic acid (except AUG, which is ordinarily the only codon for methionine, and TGG, which is ordinarily the only codon for tryptophan) can be modified to yield a functionally identical molecule. Accordingly, each silent variation of a nucleic acid which encodes a polypeptide is implicit in each described sequence with respect to the expression product, but not with respect to actual probe sequences.

[0040] As to amino acid sequences, one of skill will recognize that individual substitutions, deletions or additions to a nucleic acid, peptide, polypeptide, or protein sequence which alters, adds or deletes a single amino acid or a small percentage of amino acids in the encoded sequence is a “conservatively modified variant” where the alteration results in the substitution of an amino acid with a chemically similar amino acid. Conservative substitution tables providing functionally similar amino acids are well known in the art. Such conservatively modified variants are in addition to and do not exclude polymorphic variants, interspecies homologs, and alleles of the invention.

[0041] The following eight groups each contain amino acids that are conservative substitutions for one another: 1) Alanine (A), Glycine (G); 2) Aspartic acid (D), Glutamic acid (E); 3) Asparagine (N), Glutamine (Q); 4) Arginine (R), Lysine (K); 5) Isoleucine (I), Leucine (L), Methionine (M), Valine (V); 6) Phenylalanine (F), Tyrosine (Y), Tryptophan (W); 7) Serine (S), Threonine (T); and 8) Cysteine (C), Methionine (M) (see, e.g., Creighton, Proteins (1984)).

[0042] Macromolecular structures such as polypeptide structures can be described in terms of various levels of organization. For a general discussion of this organization, see, e.g., Alberts et al., Molecular Biology of the Cell (3^{rd} ed., 1994) and Cantor and Schimmel, Biophysical Chemistry Part I: The Conformation of Biological Macromolecules (1980). “Primary structure” refers to the amino acid sequence of a particular peptide. “Secondary structure” refers to locally ordered, three dimensional structures within a polypeptide. These structures are commonly known as domains. Domains are portions of a polypeptide that form a compact unit of the polypeptide and are typically 25 to approximately 500 amino acids long. Typical domains are made up of sections of lesser organization such as stretches of β-sheet and a-helices. “Tertiary structure” refers to the complete three dimensional structure of a polypeptide monomer. “Quaternary structure” refers to the three dimensional structure formed, usually by the noncovalent association of independent tertiary units. Anisotropic terms are also known as energy terms.

[0043] A “label” or a “detectable moiety” is a composition detectable by spectroscopic, photochemical, biochemical, immunochemical, chemical, or other physical means. For example, useful labels include ³²P, fluorescent dyes, electron-dense reagents, enzymes (e.g., as commonly used in an ELISA), biotin, digoxigenin, or haptens and proteins which can be made detectable, e.g., by incorporating a radiolabel into the peptide or used to detect antibodies specifically reactive with the peptide.

[0044] An “effector” or “effector moiety” or “effector component” is a molecule that is bound (or linked, or conjugated), either covalently, through a linker or a chemical bond, or noncovalently, through ionic, van der Waals, electrostatic, or hydrogen bonds, to an antibody. The “effector” can be a variety of molecules including, for example, detection moieties including radioactive compounds, fluroescent compounds, an enzyme or substrate, tags such as epitope tags, a toxin; a chemotherapeutic agent; a lipase; an antibiotic; or a radioisotope emitting “hard” e.g., beta radiation.

[0045] A “labeled nucleic acid probe or oligonucleotide” is one that is bound, either covalently, through a linker or a chemical bond, or noncovalently, through ionic, van der Waals, electrostatic, or hydrogen bonds to a label such that the presence of the probe may be detected by detecting the presence of the label bound to the probe. Alternatively, method using high affinity interactions may achieve the same results where one of a pair of binding partners binds to the other, e.g., biotin, streptavidin.

[0046] As used herein a “nucleic acid probe or oligonucleotide” is defined as a nucleic acid capable of binding to a target nucleic acid of complementary sequence through one or more types of chemical bonds, usually through complementary base pairing, usually through hydrogen bond formation. As used herein, a probe may include natural (i.e., A, G, C, or T) or modified bases (7-deazaguanosine, inosine, etc.). In addition, the bases in a probe may be joined by a linkage other than a phosphodiester bond, so long as it does not interfere with hybridization. Thus, for example, probes may be peptide nucleic acids in which the constituent bases are joined by peptide bonds rather than phosphodiester linkages. It will be understood by one of skill in the art that probes may bind target sequences lacking complete complementarity with the probe sequence depending upon the stringency of the hybridization conditions. The probes are preferably directly labeled as with isotopes, chromophores, lumiphores, chromogens, or indirectly labeled such as with biotin to which a streptavidin complex may later bind. By assaying for the presence or absence of the probe, one can detect the presence or absence of the select sequence or subsequence.

[0047] The term “recombinant” when used with reference, e.g., to a cell, or nucleic acid, protein, or vector, indicates that the cell, nucleic acid, protein or vector, has been modified by the introduction of a heterologous nucleic acid or protein or the alteration of a native nucleic acid or protein, or that the cell is derived from a cell so modified. Thus, for example, recombinant cells express genes that are not found within the native (non-recombinant) form of the cell or express native genes that are otherwise abnormally expressed, under expressed or not expressed at all.

[0048] The term “heterologous” when used with reference to portions of a nucleic acid indicates that the nucleic acid comprises two or more subsequences that are not found in the same relationship to each other in nature. For instance, the nucleic acid is typically recombinantly produced, having two or more sequences from unrelated genes arranged to make a new functional nucleic acid, e.g., a promoter from one source and a coding region from another source. Similarly, a heterologous protein indicates that the protein comprises two or more subsequences that are not found in the same relationship to each other in nature (e.g., a fusion protein).

[0049] A “promoter” is defined as an array of nucleic acid control sequences that direct transcription of a nucleic acid. As used herein, a promoter includes necessary nucleic acid sequences near the start site of transcription, such as, in the case of a polymerase II type promoter, a TATA element. A promoter also optionally includes distal enhancer or repressor elements, which can be located as much as several thousand base pairs from the start site of transcription. A “constitutive” promoter is a promoter that is active under most environmental and developmental conditions. An “inducible” promoter is a promoter that is active under environmental or developmental regulation. The term “operably linked” refers to a functional linkage between a nucleic acid expression control sequence (such as a promoter, or array of transcription factor binding sites) and a second nucleic acid sequence, wherein the expression control sequence directs transcription of the nucleic acid corresponding to the second sequence.

[0050] An “expression vector” is a nucleic acid construct, generated recombinantly or synthetically, with a series of specified nucleic acid elements that permit transcription of a particular nucleic acid in a host cell. The expression vector can be part of a plasmid, virus, or nucleic acid fragment. Typically, the expression vector includes a nucleic acid to be transcribed operably linked to a promoter.

[0051] The phrase “selectively (or specifically) hybridizes to” refers to the binding, duplexing, or hybridizing of a molecule only to a particular nucleotide sequence under stringent hybridization conditions when that sequence is present in a complex mixture (e.g., total cellular or library DNA or RNA).

[0052] The phrase “stringent hybridization conditions” refers to conditions under which a probe will hybridize to its target subsequence, typically in a complex mixture of nucleic acids, but to no other sequences. Stringent conditions are sequence-dependent and will be different in different circumstances. Longer sequences hybridize specifically at higher temperatures. An extensive guide to the hybridization of nucleic acids is found in Tijseen, Techniques in Biochemistry and Molecular Biology—Hybridization with Nucleic Probes, “Overview of principles of hybridization and the strategy of nucleic acid assays” (1993). Generally, stringent conditions are selected to be about 5-10° C. lower than the thermal melting point (Tₘ) for the specific sequence at a defined ionic strength pH. The Tₘ is the temperature (under defined ionic strength, pH, and nucleic concentration) at which 50% of the probes complementary to the target hybridize to the target sequence at equilibrium (as the target sequences are present in excess, at Tₘ, 50% of the probes are occupied at equilibrium). Stringent conditions will be those in which the salt concentration is less than about 1.0 M sodium ion, typically about 0.01 to 1.0 M sodium ion concentration (or other salts) at pH 7.0 to 8.3 and the temperature is at least about 30° C. for short probes (e.g., 10 to 50 nucleotides) and at least about 60° C. for long probes (e.g., greater than 50 nucleotides). Stringent conditions may also be achieved with the addition of destabilizing agents such as formamide. For selective or specific hybridization, a positive signal is at least two times background, preferably 10 times background hybridization. Exemplary stringent hybridization conditions can be as following: 50% formamide, 5× SSC, and 1% SDS, incubating at 42° C., or, 5× SSC, 1% SDS, incubating at 65° C., with wash in 0.2× SSC, and 0.1% SDS at 65° C. For PCR, a temperature of about 36° C. is typical for low stringency amplification, although annealing temperatures may vary between about 32° C. and 48° C. depending on primer length. For high stringency PCR amplification, a temperature of about 62° C. is typical, although high stringency annealing temperatures can range from about 50° C. to about 65° C., depending on the primer length and specificity. Typical cycle conditions for both high and low stringency amplifications include a denaturation phase of 90° C.-95° C. for 30 sec-2 min., an annealing phase lasting 30 sec.-2 min., and an extension phase of about 72° C. for 1-2 min. Protocols and guidelines for low and high stringency amplification reactions are provided, e.g., in Innis et al. (1990) PCR Protocols, A Guide to Methods and Applications, Academic Press, Inc. N.Y.).

[0053] Nucleic acids that do not hybridize to each other under stringent conditions are still substantially identical if the polypeptides which they encode are substantially identical. This occurs, for example, when a copy of a nucleic acid is created using the maximum codon degeneracy permitted by the genetic code. In such cases, the nucleic acids typically hybridize under moderately stringent hybridization conditions. Exemplary “moderately stringent hybridization conditions” include a hybridization in a buffer of 40% formamide, 1 M NaCl, 1% SDS at 37° C., and a wash in 1× SSC at 45° C. A positive hybridization is at least twice background. Those of ordinary skill will readily recognize that alternative hybridization and wash conditions can be utilized to provide conditions of similar stringency. Additional guidelines for determining hybridization parameters are provided in numerous reference, e.g., and Current Protocols in Molecular Biology, ed. Ausubel, et al.

[0054] The phrase “functional effects” in the context of assays for testing compounds that modulate activity of an angiogenesis protein includes the determination of a parameter that is indirectly or directly under the influence of the angiogenesis protein, e.g., a functional, physical, or chemical effect, such as the ability to increase or decrease angiogenesis. It includes binding activity, the ability of cells to proliferate, expression in cells undergoing angiogenesis, and other characteristics of angiogenic cells. “Functional effects” include in vitro, in vivo, and ex vivo activities.

[0055] By “determining the functional effect” is meant assaying for a compound that increases or decreases a parameter that is indirectly or directly under the influence of an angiogenesis protein sequence, e.g., functional, physical and chemical effects. Such functional effects can be measured by any means known to those skilled in the art, e.g., changes in spectroscopic characteristics (e.g., fluorescence, absorbance, refractive index), hydrodynamic (e.g., shape), chromatographic, or solubility properties for the protein, measuring inducible markers or transcriptional activation of the angiogenesis protein; measuring binding activity or binding assays, e.g. binding to antibodies, and measuring cellular proliferation, particularly endothelial cell proliferation. Determination of the functional effect of a compound on angiogenesis can also be performed using angiogenesis assays known to those of skill in the art such as an in vitro assays, e.g., in vitro endothelial cell tube formation assays, and other assays such as the chick CAM assay, the mouse corneal assay, and assays that assess vascularization of an implanted tumor. The functional effects can be evaluated by many means known to those skilled in the art, e.g., microscopy for quantitative or qualitative measures of alterations in morphological features, e.g., tube or blood vessel formation, measurement of changes in RNA or protein levels for angiogenesis-associated sequences, measurement of RNA stability, identification of downstream or reporter gene expression (CAT, luciferase, β-gal, GFP and the like), e.g., via chemiluminescence, fluorescence, colorimetric reactions, antibody binding, inducible markers, and ligand binding assays.

[0056] “Inhibitors”, “activators”, and “modulators” of angiogenic polynucleotide and polypeptide sequences are used to refer to activating, inhibitory, or modulating molecules identified using in vitro and in vivo assays of angiogenic polynucleotide and polypeptide sequences. Inhibitors are compounds that, e.g., bind to, partially or totally block activity, decrease, prevent, delay activation, inactivate, desensitize, or down regulate the activity or expression of angiogenesis proteins, e.g., antagonists. “Activators” are compounds that increase, open, activate, facilitate, enhance activation, sensitize, agonize, or up regulate angiogenesis protein activity. Inhibitors, activators, or modulators also include genetically modified versions of angiogenesis proteins, e.g., versions with altered activity, as well as naturally occurring and synthetic ligands, antagonists, agonists, antibodies, small chemical molecules and the like. Such assays for inhibitors and activators include, e.g., expressing the angiogenic protein in vitro, in cells, or cell membranes, applying putative modulator compounds, and then determining the functional effects on activity, as described above. Activators and inhibitors of angiogenesis can also be identified by incubating angiogenic cells with the test compound and determining increases or decreases in the expression of 1 or more angiogenesis proteins, e.g., 1, 2, 3, 4, 5, 10, 15, 20, 25, 30, 40, 50 or more angiogenesis proteins, such as angiogenesis proteins comprising the sequences set out in Table 2.

[0057] Samples or assays comprising angiogenesis proteins that are treated with a potential activator, inhibitor, or modulator are compared to control samples without the inhibitor, activator, or modulator to examine the extent of inhibition. Control samples (untreated with inhibitors) are assigned a relative protein activity value of 100%. Inhibition of a polypeptide is achieved when the activity value relative to the control is about 80%, preferably 50%, more preferably 25-0%. Activation of an angiogenesis polypeptide is achieved when the activity value relative to the control (untreated with activators) is 110%, more preferably 150%, more preferably 200-500% (i.e., two to five fold higher relative to the control), more preferably 1000-3000% higher.

[0058] “Antibody” refers to a polypeptide comprising a framework region from an immunoglobulin gene or fragments thereof that specifically binds and recognizes an antigen. The recognized immunoglobulin genes include the kappa, lambda, alpha, gamma, delta, epsilon, and mu constant region genes, as well as the myriad immunoglobulin variable region genes. Light chains are classified as either kappa or lambda. Heavy chains are classified as gamma, mu, alpha, delta, or epsilon, which in turn define the immunoglobulin classes, IgG, IgM, IgA, IgD and IgE, respectively. Typically, the antigen-binding region of an antibody will be most critical in specificity and affinity of binding.

[0059] An exemplary immunoglobulin (antibody) structural unit comprises a tetramer. Each tetramer is composed of two identical pairs of polypeptide chains, each pair having one “light” (about 25 kD) and one “heavy” chain (about 50-70 kD). The N-terminus of each chain defines a variable region of about 100 to 110 or more amino acids primarily responsible for antigen recognition. The terms variable light chain (V_{L}) and variable heavy chain (V_{H}) refer to these light and heavy chains respectively.

[0060] Antibodies exist, e.g., as intact immunoglobulins or as a number of well-characterized fragments produced by digestion with various peptidases. Thus, for example, pepsin digests an antibody below the disulfide linkages in the hinge region to produce F(ab)′₂, a dimer of Fab which itself is a light chain joined to V_{H}-C_{H}1 by a disulfide bond. The F(ab)′₂ may be reduced under mild conditions to break the disulfide linkage in the hinge region, thereby converting the F(ab)′₂ dimer into an Fab′ monomer. The Fab′ monomer is essentially Fab with part of the hinge region (see Fundamental Immunology (Paul ed., 3d ed. 1993). While various antibody fragments are defined in terms of the digestion of an intact antibody, one of skill will appreciate that such fragments may be synthesized de novo either chemically or by using recombinant DNA methodology. Thus, the term antibody, as used herein, also includes antibody fragments either produced by the modification of whole antibodies, or those synthesized de novo using recombinant DNA methodologies (e.g., single chain Fv) or those identified using phage display libraries (see, e.g., McCafferty et al., Nature 348:552-554 (1990))

[0061] For preparation of antibodies, e.g., recombinant, monoclorial, or polyclonal antibodies, many technique known in the art can be used (see, e.g., Kohler & Milstein, Nature 256:495-497 (1975); Kozbor et al., Immunology Today 4: 72 (1983); Cole et al., pp. 77-96 in Monoclonal Antibodies and Cancer Therapy, Alan R. Liss, Inc. (1985); Coligan, Current Protocols in Immunology (1991); Harlow & Lane, Antibodies, A Laboratory Manual (1988); and Goding, Monoclonal Antibodies: Principles and Practice (2d ed. 1986)). Techniques for the production of single chain antibodies (U.S. Pat. No. 4,946,778) can be adapted to produce antibodies to polypeptides of this invention. Also, transgenic mice, or other organisms such as other mammals, may be used to express humanized antibodies. Alternatively, phage display technology can be used to identify antibodies and heteromeric Fab fragments that specifically bind to selected antigens (see, e.g., McCafferty et al., Nature 348:552-554 (1990); Marks et al., Biotechnology 10:779-783 (1992)).

[0062] A “chimeric antibody” is an antibody molecule in which (a) the constant region, or a portion thereof, is altered, replaced or exchanged so that the antigen binding site (variable region) is linked to a constant region of a different or altered class, effector function and/or species or an entirely different molecule which confers new properties to the chimeric antibody, e.g., an enzyme, toxin, hormone, growth factor, drug, etc.; or (b) the variable region, or a portion thereof, is altered, replaced or exchanged with a variable region having a different or altered antigen specificity.

[0063] The present application may be related to U.S. Ser. No. 09/437,702, filed Nov. 10, 1999; U.S. Ser. No. 09/437,528, filed Nov. 10, 1999; U.S. Ser. No. 09/434,197, filed Nov. 4, 1999; U.S. Ser. No. 60/183,926, filed Feb. 22, 2000; U.S. Ser. No. 09/440,493, filed Nov. 15, 1999; U.S. Ser. No. 09/520,478, filed Mar. 8, 2000; U.S. Ser. No. 09/440,369, filed Nov. 12, 1999; Attorney Docket number A68928, filed Dec. 15, 2000; Attorney Docket number A69789, filed Jan. 22, 2001; and Attorney Docket number A69806, filed Dec. 15, 2000.

[0064] The detailed description of the invention includes discussion of the following aspects of the invention:

[0065] Expression of angiogenesis-associated sequences

[0066] Informatics

[0067] Angiogenesis-associated sequences

[0068] Detection of angiogenesis sequence for diagnostic and therapeutic applications

[0069] Modulators of angiogenesis

[0070] Methods of identifying variant angiogenesis-associated sequences

[0071] Administration of pharmaceutical and vaccine compositions

[0072] Kits for use in diagnostic and/or prognostic applications.

[0073] Expression of Angiogenesis-associated Sequences

[0074] In one aspect, the expression levels of genes are determined in different patient samples for which diagnosis information is desired, to provide expression profiles. An expression profile of a particular sample is essentially a “fingerprint” of the state of the sample; while two states may have any particular gene similarly expressed, the evaluation of a number of genes simultaneously allows the generation of a gene expression profile that is unique to the state of the cell. That is, normal tissue may be distinguished from AD tissue. By comparing expression profiles of tissue in known different angiogenesis states, information regarding which genes are important (including both up- and down-regulation of genes) in each of these states is obtained. The identification of sequences that are differentially expressed in angiogenic versus non-angiogenic tissue allows the use of this information in a number of ways. For example, a particular treatment regime may be evaluated: does a chemotherapeutic drug act to down-regulate angiogenesis, and thus tumor growth or recurrence, in a particular patient. Similarly, diagnosis and treatment outcomes may be done or confirmed by comparing patient samples with the known expression profiles. Angiogenic tissue can also be analyzed to determine the stage of angiogenesis in the tissue. Furthermore, these gene expression profiles (or individual genes) allow screening of drug candidates with an eye to mimicking or altering a particular expression profile; for example, screening can be done for drugs that suppress the angiogenic expression profile. This may be done by making biochips comprising sets of the important angiogenesis genes, which can then be used in these screens. These methods can also be done on the protein basis; that is, protein expression levels of the angiogenic proteins can be evaluated for diagnostic purposes or to screen candidate agents. In addition, the angiogenic nucleic acid sequences can be administered for gene therapy purposes, including the administration of antisense nucleic acids, or the angiogenic proteins (including antibodies and other modulators thereof) administered as therapeutic drugs.

[0075] Thus the present invention provides nucleic acid and protein sequences that are differentially expressed in angiogenesis, herein termed “angiogenesis sequences”. As outlined below, angiogenesis sequences include those that are up-regulated (i.e. expressed at a higher level) in disorders associated with angiogenesis, as well as those that are down-regulated (i.e. expressed at a lower level). In a preferred embodiment, the angiogenesis sequences are from humans; however, as will be appreciated by those in the art, angiogenesis sequences from other organisms may be useful in animal models of disease and drug evaluation; thus, other angiogenesis sequences are provided, from vertebrates, including mammals, including rodents (rats, mice, hamsters, guinea pigs, etc.), primates, farm animals (including sheep, goats, pigs, cows, horses, etc). Angiogenesis sequences from other organisms may be obtained using the techniques outlined below.

[0076] Angiogenesis sequences can include both nucleic acid and amino acid sequences. In a preferred embodiment, the angiogenesis sequences are recombinant nucleic acids. By the term “recombinant nucleic acid” herein is meant nucleic acid, originally formed in vitro, in general, by the manipulation of nucleic acid e.g., using polymerases and endonucleases, in a form not normally found in nature. Thus an isolated nucleic acid, in a linear form, or an expression vector formed in vitro by ligating DNA molecules that are not normally joined, are both considered recombinant for the purposes of this invention. It is understood that once a recombinant nucleic acid is made and reintroduced into a host cell or organism, it will replicate non-recombinantly, i.e. using the in vivo cellular machinery of the host cell rather than in vitro manipulations; however, such nucleic acids, once produced recombinantly, although subsequently replicated non-recombinantly, are still considered recombinant for the purposes of the invention.

[0077] Similarly, a “recombinant protein” is a protein made using recombinant techniques, i.e. through the expression of a recombinant nucleic acid as depicted above. A recombinant protein is distinguished from naturally occurring protein by at least one or more characteristics. For example, the protein may be isolated or purified away from some or all of the proteins and compounds with which it is normally associated in its wild type host, and thus may be substantially pure. For example, an isolated protein is unaccompanied by at least some of the material with which it is normally associated in its natural state, preferably constituting at least about 0.5%, more preferably at least about 5% by weight of the total protein in a given sample. A substantially pure protein comprises at least about 75% by weight of the total protein, with at least about 80% being preferred, and at least about 90% being particularly preferred. The definition includes the production of an angiogenesis protein from one organism in a different organism or host cell. Alternatively, the protein may be made at a significantly higher concentration than is normally seen, through the use of an inducible promoter or high expression promoter, such that the protein is made at increased concentration levels. Alternatively, the protein may be in a form not normally found in nature, as in the addition of an epitope tag or amino acid substitutions, insertions and deletions, as discussed below.

[0078] In a preferred embodiment, the angiogenesis sequences are nucleic acids. As will be appreciated by those in the art and is more fully outlined below, angiogenesis sequences are useful in a variety of applications, including diagnostic applications, which will detect naturally occurring nucleic acids, as well as screening applications; for example, biochips comprising nucleic acid probes to the angiogenesis sequences can be generated. In the broadest sense, then, by “nucleic acid” or “oligonucleotide” or grammatical equivalents herein means at least two nucleotides covalently linked together. A nucleic acid of the present invention will generally contain phosphodiester bonds, although in some cases, nucleic acid analogs are included that may have alternate backbones, comprising, for example, phosphoramidate, phosphorothioate, phosphorodithioate, or O-methylphophoroamidite linkages (see Eckstein, Oligonucleotides and Analogues: A Practical Approach, Oxford University Press); and peptide nucleic acid backbones and linkages. Other analog nucleic acids include those with positive backbones; non-ionic backbones, and non-ribose backbones, including those described in U.S. Pat. Nos. 5,235,033 and 5,034,506, and Chapters 6 and 7, ASC Symposium Series 580, “Carbohydrate Modifications in Antisense Research”, Ed. Y. S. Sanghui and P. Dan Cook. Nucleic acids containing one or more carbocyclic sugars are also included within one definition of nucleic acids. Modifications of the ribose-phosphate backbone may be done for a variety of reasons, for example to increase the stability and half-life of such molecules in physiological environments or as probes on a biochip.

[0079] As will be appreciated by those in the art, nucleic acid analogs may find use in the present invention. In addition, mixtures of naturally occurring nucleic acids and analogs can be made; alternatively, mixtures of different nucleic acid analogs, and mixtures of naturally occurring nucleic acids and analogs may be made.

[0080] Particularly preferred are peptide nucleic acids (PNA) which includes peptide nucleic acid analogs. These backbones are substantially non-ionic under neutral conditions, in contrast to the highly charged phosphodiester backbone of naturally occurring nucleic acids. This results in two advantages. First, the PNA backbone exhibits improved hybridization kinetics. PNAs have larger changes in the melting temperature (Tm) for mismatched versus perfectly matched basepairs. DNA and RNA typically exhibit a 2-4° C. drop in Tₘ for an internal mismatch. With the non-ionic PNA backbone, the drop is closer to 7-9° C. Similarly, due to their non-ionic nature, hybridization of the bases attached to these backbones is relatively insensitive to salt concentration. In addition, PNAs are not degraded by cellular enzymes, and thus can be more stable.

[0081] The nucleic acids may be single stranded or double stranded, as specified, or contain portions of both double stranded or single stranded sequence. As will be appreciated by those in the art, the depiction of a single strand also defines the sequence of the complementary strand; thus the sequences described herein also provide the complement of the sequence. The nucleic acid may be DNA, both genomic and cDNA, RNA or a hybrid, where the nucleic acid may contain combinations of deoxyribo- and ribo-nucleotides, and combinations of bases, including uracil, adenine, thymine, cytosine, guanine, inosine, xanthine hypoxanthine, isocytosine, isoguanine, etc. As used herein, the term “nucleoside” includes nucleotides and nucleoside and nucleotide analogs, and modified nucleosides such as amino modified nucleosides. In addition, “nucleoside” includes non-naturally occurring analog structures. Thus for example the individual units of a peptide nucleic acid, each containing a base, are referred to herein as a nucleoside.

[0082] An angiogenesis sequence can be initially identified by substantial nucleic acid and/or amino acid sequence homology to the angiogenesis sequences outlined herein. Such homology can be based upon the overall nucleic acid or amino acid sequence, and is generally determined as outlined below, using either homology programs or hybridization conditions.

[0083] For identifying angiogenesis-associated sequences, the angiogenesis screen typically includes comparing genes identified in a modification of an in vitro model of angiogenesis as described in Hiraoka, Cell 95:365 (1998) with genes identified in controls. Samples of normal tissue and tissue undergoing angiogenesis are applied to biochips comprising nucleic acid probes. The samples are first microdissected, if applicable, and treated as is known in the art for the preparation of mRNA. Suitable biochips are commercially available, for example from Affymetrix. Gene expression profiles as described herein are generated and the data analyzed.

[0084] In a preferred embodiment, the genes showing changes in expression as between normal and disease states are compared to genes expressed in other normal tissues, including, but not limited to lung, heart, brain, liver, breast, kidney, muscle, prostate, small intestine, large intestine, spleen, bone and placenta. In a preferred embodiment, those genes identified during the angiogenesis screen that are expressed in any significant amount in other tissues are removed from the profile, although in some embodiments, this is not necessary. That is, when screening for drugs, it is usually preferable that the target be disease specific, to minimize possible side effects.

[0085] In a preferred embodiment, angiogenesis sequences are those that are up-regulated in angiogenesis disorders; that is, the expression of these genes is higher in the disease tissue as compared to normal tissue. “Up-regulation” as used herein means at least about a two-fold change, preferably at least about a three fold change, with at least about five-fold or higher being preferred. All accession numbers herein are for the GenBank sequence database and the sequences of the accession numbers are hereby expressly incorporated by reference. GenBank is known in the art, see, e.g., Benson, DA, et al., Nucleic Acids Research 26:1-7 (1998) and http://www.ncbi.nlm.nih.gov/. Sequences are also avialable in other databases, e.g., European Molecular Biology Laboratory (EMBL) and DNA Database of Japan (DDBJ). In addition, most preferred genes were found to be expressed in a limited amount or not at all in heart, brain, lung, liver, breast, kidney, prostate, small intestine and spleen.

[0086] In another preferred embodiment, angiogenesis sequences are those that are down-regulated in the angiogenesis disorder; that is, the expression of these genes is lower in angiogenic tissue as compared to normal tissue. “Down-regulation” as used herein means at least about a two-fold change, preferably at least about a three fold change, with at least about five-fold or higher being preferred.

[0087] Angiogenesis sequences according to the invention may be classified into discrete clusters of sequences based on common expression profiles of the sequences. Expression levels of angiogenesis sequences may increase or decrease as a function of time in a manner that correlates with the induction of angiogenesis. Alternatively, expression levels of angiogenesis sequences may both increase and decrease as a function of time. For example, expression levels of some angiogenesis sequences are temporarily induced or diminished during the switch to the angiogenesis phenotype, followed by a return to baseline expression levels. Table 1 provides genes, the mRNA expression of which varies as a function of time in angiogenesis tissue when compared to normal tissue.

[0088] Table 2 provides protein sequences corresponding to the coding regions of the sequences that undergo changes in expression as a function of time in tissue undergoing angiogenesis.

[0089] In a particularly preferred embodiment, angiogenesis sequences are those that are induced for a period of time, typically by positive angiogenic factors, followed by a return to the baseline levels. Sequences that are temporarily induced provide a means to target angiogenesis tissue, for example neovascularized tumors, at a particular stage of angiogenesis, while avoiding rapidly growing tissue that require perpetual vascularization. Such positive angiogenic factors include αFGF, βFGF, VEGF, angiogenin and the like.

[0090] Induced angiogenesis sequences also are further categorized with respect to the timing of induction. For example, some angiogenesis genes may be induced at an early time period, such as within 10 minutes of the induction of angiogenesis. Others may be induced later, such as between 5 and 60 minutes, while yet others may be induced for a time period of about two hours or more followed by a return to baseline expression levels.

[0091] In another preferred embodiment are angiogenesis sequences that are inhibited or reduced as a function of time followed by a return to “normal” expression levels. Inhibitors of angiogenesis are examples of molecules that have this expression profile. These sequences also can be further divided into groups depending on the timing of diminished expression. For example, some molecules may display reduced expression within 10 minutes of the induction of angiogenesis. Others may be diminished later, such as between 5 and 60 minutes, while others may be diminished for a time period of about two hours or more followed by a return to baseline. Examples of such negative angiogenic factors include thrombospondin and endostatin to name a few.

[0092] In yet another preferred embodiment are angiogenesis sequences that are induced for prolonged periods. These sequences are typically associated with induction of angiogenesis and may participate in induction and/or maintenance of the angiogenesis phenotype.

[0093] In another preferred embodiment are angiogenesis sequences, the expression of which is reduced or diminished for prolonged periods in angiogenic tissue. These sequences are typically angiogenesis inhibitors and their diminution is correlated with an increase in angiogenesis.

[0094] Informatics

[0095] The ability to identify genes that undergo changes in expression with time during angiogenesis can additionally provide high-resolution, high-sensitivity datasets which can be used in the areas of diagnostics, therapeutics, drug development, biosensor development, and other related areas. For example, the expression profiles can be used in diagnostic or prognostic evaluation of patients with angiogenesis-associated disease. Or as another example, subcellular toxicological information can be generated to better direct drug structure and activity correlation (see, Anderson, L., “Pharmaceutical Proteomics: Targets, Mechanism, and Function,” paper presented at the IBC Proteomics conference, Coronado, Calif. (Jun. 11-12, 1998)). Subcellular toxicological information can also be utilized in a biological sensor device to predict the likely toxicological effect of chemical exposures and likely tolerable exposure thresholds (see, U.S. Pat. No. 5,811,231). Similar advantages accrue from datasets relevant to other biomolecules and bioactive agents (e.g. nucleic acids, saccharides, lipids, drugs, and the like).

[0096] Thus, in another embodiment, the present invention provides a database that includes at least one set of data assay data. The data contained in the database is acquired, e.g., using array analysis either singly or in a library format. The database can be in substantially any form in which data can be maintained and transmitted, but is preferably an electronic database. The electronic database of the invention can be maintained on any electronic device allowing for the storage of and access to the database, such as a personal computer, but is preferably distributed on a wide area network, such as the World Wide Web.

[0097] The focus of the present section on databases that include peptide sequence data is for clarity of illustration only. It will be apparent to those of skill in the art that similar databases can be assembled for any assay data acquired using an assay of the invention.

[0098] The compositions and methods for identifying and/or quantitating the relative and/or absolute abundance of a variety of molecular and macromolecular species from a biological sample undergoing angiogenesis, i.e., the identification of angiogenesis-associated sequences described herein, provide an abundance of information, which can be correlated with pathological conditions, predisposition to disease, drug testing, therapeutic monitoring, gene-disease causal linkages, identification of correlates of immunity and physiological status, among others. Although the data generated from the assays of the invention is suited for manual review and analysis, in a preferred embodiment, prior data processing using high-speed computers is utilized.

[0099] An array of methods for indexing and retrieving biomolecular information is known in the art. For example, U.S. Pat. Nos. 6,023,659 and 5,966,712 disclose a relational database system for storing biomolecular sequence information in a manner that allows sequences to be catalogued and searched according to one or more protein function hierarchies. U.S. Pat. No. 5,953,727 discloses a relational database having sequence records containing information in a format that allows a collection of partial-length DNA sequences to be catalogued and searched according to association with one or more sequencing projects for obtaining fill-length sequences from the collection of partial length sequences. U.S. Pat. No. 5,706,498 discloses a gene database retrieval system for making a retrieval of a gene sequence similar to a sequence data item in a gene database based on the degree of similarity between a key sequence and a target sequence. U.S. Pat. No. 5,538,897 discloses a method using mass spectroscopy fragmentation patterns of peptides to identify amino acid sequences in computer databases by comparison of predicted mass spectra with experimentally-derived mass spectra using a closeness-of-fit measure. U.S. Pat. No. 5,926,818 discloses a multi-dimensional database comprising a functionality for multi-dimensional data analysis described as on-line analytical processing (OLAP), which entails the consolidation of projected and actual data according to more than one consolidation path or dimension. U.S. Pat. No. 5,295,261 reports a hybrid database structure in which the fields of each database record are divided into two classes, navigational and informational data, with navigational fields stored in a hierarchical topological map which can be viewed as a tree structure or as the merger of two or more such tree structures.

[0100] The present invention provides a computer database comprising a computer and software for storing in computer-retrievable form assay data records cross-tabulated, e.g., with data specifying the source of the target-containing sample from which each sequence specificity record was obtained.

[0101] In an exemplary embodiment, at least one of the sources of target-containing sample is from a control tissue sample known to be free of pathological disorders. In a variation, at least one of the sources is a known pathological tissue specimen, e.g. a neoplastic lesion or another tissue specimen to be analyzed for angiogenesis. In another variation, the assay records cross-tabulate one or more of the following parameters for each target species in a sample: (1) a unique identification code, which can include, e.g., a target molecular structure and/or characteristic separation coordinate (e.g. electrophoretic coordinates); (2) sample source; and (3) absolute and/or relative quantity of the target species present in the sample.

[0102] The invention also provides for the storage and retrieval of a collection of target data in a computer data storage apparatus, which can include magnetic disks, optical disks, magneto-optical disks, DRAM, SRAM, SGRAM, SDRAM, RDRAM, DDR RAM, magnetic bubble memory devices, and other data storage devices, including CPU registers and on-CPU data storage arrays. Typically, the target data records are stored as a bit pattern in an array of magnetic domains on a magnetizable medium or as an array of charge states or transistor gate states, such as an array of cells in a DRAM device (e.g., each cell comprised of a transistor and a charge storage area, which may be on the transistor). In one embodiment, the invention provides such storage devices, and computer systems built therewith, comprising a bit pattern encoding a protein expression fingerprint record comprising unique identifiers for at least 10 target data records cross-tabulated with target source.

[0103] When the target is a peptide or nucleic acid, the invention preferably provides a method for identifying related peptide or nucleic acid sequences, comprising performing a computerized comparison between a peptide or nucleic acid sequence assay record stored in or retrieved from a computer storage device or database and at least one other sequence. The comparison can include a sequence analysis or comparison algorithm or computer program embodiment thereof (e.g., FASTA, TFASTA, GAP, BESTFIT) and/or the comparison may be of the relative amount of a peptide or nucleic acid sequence in a pool of sequences determined from a polypeptide or nucleic acid sample of a specimen.

[0104] The invention also preferably provides a magnetic disk, such as an IBM-compatible (DOS, Windows Windows95/98/2000, Windows NT, OS/2) or other format (e.g., Linux, SunOS, Solaris, AIX, SCO Unix, VMS, MV, Macintosh, etc.) floppy diskette or hard (fixed, Winchester) disk drive, comprising a bit pattern encoding data from an assay of the invention in a file format suitable for retrieval and processing in a computerized sequence analysis, comparison, or relative quantitation method.

[0105] The invention also provides a network, comprising a plurality of computing devices linked via a data link, such as an Ethernet cable (coax or 10 BaseT), telephone line, ISDN line, wireless network, optical fiber, or other suitable signal tranmission medium, whereby at least one network device (e.g., computer, disk array, etc.) comprises a pattern of magnetic domains (e.g., magnetic disk) and/or charge domains (e.g., an array of DRAM cells) composing a bit pattern encoding data acquired from an assay of the invention.

[0106] The invention also provides a method for transmitting assay data that includes generating an electronic signal on an electronic communications device, such as a modem, ISDN terminal adapter, DSL, cable modem, ATM switch, or the like, wherein the signal includes (in native or encrypted format) a bit pattern encoding data from an assay or a database comprising a plurality of assay results obtained by the method of the invention.

[0107] In a preferred embodiment, the invention provides a computer system for comparing a query target to a database containing an array of data structures, such as an assay result obtained by the method of the invention, and ranking database targets based on the degree of identity and gap weight to the target data. A central processor is preferably initialized to load and execute the computer program for alignment and/or comparison of the assay results. Data for a query target is entered into the central processor via an I/O device. Execution of the computer program results in the central processor retrieving the assay data from the data file, which comprises a binary description of an assay result.

[0108] The target data or record and the computer program can be transferred to secondary memory, which is typically random access memory (e.g. DRAM, SRAM, SGRAM, or SDRAM). Targets are ranked according to the degree of correspondence between a selected assay characteristic (e.g., binding to a selected affinity moiety) and the same characteristic of the query target and results are output via an I/O device. For example, a central processor can be a conventional computer (e.g., Intel Pentium, PowerPC, Alpha, PA-8000, SPARC, MIPS 4400, MIPS 10000, VAX, etc.); a program can be a commercial or public domain molecular biology software package (e.g., UWGCG Sequence Analysis Software, Darwin); a data file can be an optical or magnetic disk, a data server, a memory device (e.g., DRAM, SRAM, SGRAM, SDRAM, EPROM, bubble memory, flash memory, etc.); an I/O device can be a terminal comprising a video display and a keyboard, a modem, an ISDN terminal adapter, an Ethernet port, a punched card reader, a magnetic strip reader, or other suitable I/O device.

[0109] The invention also preferably provides the use of a computer system, such as that described above, which comprises: (1) a computer; (2) a stored bit pattern encoding a collection of peptide sequence specificity records obtained by the methods of the invention, which may be stored in the computer; (3) a comparison target, such as a query target; and (4) a program for alignment and comparison, typically with rank-ordering of comparison results on the basis of computed similarity values.

[0110] Angiogenesis-associated Sequences

[0111] Angiogenesis proteins of the present invention may be classified as secreted proteins, transmembrane proteins or intracellular proteins. In one embodiment, the angiogenesis protein is an intracellular protein. Intracellular proteins may be found in the cytoplasm and/or in the nucleus. Intracellular proteins are involved in all aspects of cellular function and replication (including, e.g., signaling pathways); aberrant expression of such proteins often results in unregulated or disregulated cellular processes (see, e.g., Molecular Biology of the Cell, 3rd Edition, Alberts, Ed., Garland Pub., 1994). For example, many intracellular proteins have enzymatic activity such as protein kinase activity, protein phosphatase activity, protease activity, nucleotide cyclase activity, polymerase activity and the like. Intracellular proteins also serve as docking proteins that are involved in organizing complexes of proteins, or targeting proteins to various subcellular localizations, and are involved in maintaining the structural integrity of organelles.

[0112] An increasingly appreciated concept in characterizing proteins is the presence in the proteins of one or more motifs for which defined functions have been attributed. In addition to the highly conserved sequences found in the enzymatic domain of proteins, highly conserved sequences have been identified in proteins that are involved in protein-protein interaction. For example, Src-homology-2 (SH2) domains bind tyrosine-phosphorylated targets in a sequence dependent manner. PTB domains, which are distinct from SH2 domains, also bind tyrosine phosphorylated targets. SH3 domains bind to proline-rich targets. In addition, PH domains, tetratricopeptide repeats and WD domains to name only a few, have been shown to mediate protein-protein interactions. Some of these may also be involved in binding to phospholipids or other second messengers. As will be appreciated by one of ordinary skill in the art, these motifs can be identified on the basis of primary sequence; thus, an analysis of the sequence of proteins may provide insight into both the enzymatic potential of the molecule and/or molecules with which the protein may associate.

[0113] In another embodiment, the angiogenesis sequences are transmembrane proteins. Transmembrane proteins are molecules that span a phospholipid bilayer of a cell. They may have an intracellular domain, an extracellular domain, or both. The intracellular domains of such proteins may have a number of functions including those already described for intracellular proteins. For example, the intracellular domain may have enzymatic activity and/or may serve as a binding site for additional proteins. Frequently the intracellular domain of transmembrane proteins serves both roles. For example certain receptor tyrosine kinases have both protein kinase activity and SH2 domains. In addition, autophosphorylation of tyrosines on the receptor molecule itself, creates binding sites for additional SH2 domain containing proteins.

[0114] Transmembrane proteins may contain from one to many transmembrane domains. For example, receptor tyrosine kinases, certain cytokine receptors, receptor guanylyl cyclases and receptor serine/threonine protein kinases contain a single transmembrane domain. However, various other proteins including channels and adenylyl cyclases contain numerous transmembrane domains. Many important cell surface receptors such as G protein coupled receptors (GPCRs) are classified as “seven transmembrane domain” proteins, as they contain 7 membrane spanning regions. Characteristics of transmembrane domains include approximately 20 consecutive hydrophobic amino acids that may be followed by charged amino acids. Therefore, upon analysis of the amino acid sequence of a particular protein, the localization and number of transmembrane domains within the protein may be predicted (see, e.g. PSORT web site http://psort.nibb.acjp/).

[0115] The extracellular domains of transmembrane proteins are diverse; however, conserved motifs are found repeatedly among various extracellular domains. Conserved structure and/or functions have been ascribed to different extracellular motifs. Many extracellular domains are involved in binding to other molecules. In one aspect, extracellular domains are found on receptors. Factors that bind the receptor domain include circulating ligands, which may be peptides, proteins, or small molecules such as adenosine and the like. For example, growth factors such as EGF, FGF and PDGF are circulating growth factors that bind to their cognate receptors to initiate a variety of cellular responses. Other factors include cytokines, mitogenic factors, neurotrophic factors and the like. Extracellular domains also bind to cell-associated molecules. In this respect, they mediate cell-cell interactions. Cell-associated ligands can be tethered to the cell for example via a glycosylphosphatidylinositol (GPI) anchor, or may themselves be transmembrane proteins. Extracellular domains also associate with the extracellular matrix and contribute to the maintenance of the cell structure.

[0116] Angiogenesis proteins that are transmembrane are particularly preferred in the present invention as they are readily accessible targets for immunotherapeutics, as are described herein. In addition, as outlined below, transmembrane proteins can be also useful in imaging modalities. Antibodies may be used to label such readily accessible proteins in situ. Alternatively, antibodies can also label intracellular proteins, in which case samples are typically permeablized to provide acess to intracellular proteins.

[0117] It will also be appreciated by those in the art that a transmembrane protein can be made soluble by removing transmembrane sequences, for example through recombinant methods. Furthermore, transmembrane proteins that have been made soluble can be made to be secreted through recombinant means by adding an appropriate signal sequence.

[0118] In another embodiment, the angiogenesis proteins are secreted proteins; the secretion of which can be either constitutive or regulated. These proteins have a signal peptide or signal sequence that targets the molecule to the secretory pathway. Secreted proteins are involved in numerous physiological events; by virtue of their circulating nature, they serve to transmit signals to various other cell types. The secreted protein may function in an autocrine manner (acting on the cell that secreted the factor), a paracrine manner (acting on cells in close proximity to the cell that secreted the factor) or an endocrine manner (acting on cells at a distance). Thus secreted molecules find use in modulating or altering numerous aspects of physiology. Angiogenesis proteins that are secreted proteins are particularly preferred in the present invention as they serve as good targets for diagnostic markers, e.g., for blood or serum tests.

[0119] An angiogenesis sequence is initially identified by substantial nucleic acid and/or amino acid sequence homology or linkage to the angiogenesis sequences outlined herein. Such homology can be based upon the overall nucleic acid or amino acid sequence, and is generally determined as outlined below, using either homology programs or hybridization conditions. Typically, linked sequences on a mRNA are found on the same molecule.

[0120] As detailed in the definitions, percent identity can be determined using an algorithm such as BLAST. A preferred method utilizes the BLASTN module of WU-BLAST-2 set to the default parameters, with overlap span and overlap fraction set to 1 and 0.125, respectively. The alignment may include the introduction of gaps in the sequences to be aligned. In addition, for sequences which contain either more or fewer nucleotides than those of the nucleic acids of the figure it is understood that the percentage of homology will be determined based on the number of homologous nucleosides in relation to the total number of nucleosides. Thus, for example, homology of sequences shorter than those of the sequences identified herein and as discussed below, will be determined using the number of nucleosides in the shorter sequence.

[0121] In one embodiment, the nucleic acid homology is determined through hybridization studies. Thus, e.g., nucleic acids which hybridize under high stringency to a nucleic acid of Table 1, or its complement, or is also found on naturally occurring mRNAs is considered an angiogenesis sequence. In another embodiment, less stringent hybridization conditions are used; for example, moderate or low stringency conditions may be used, as are known in the art; see Ausubel, supra, and Tijssen, supra.

[0122] In addition, the angiogenesis nucleic acid sequences of the invention, e.g, the sequence in Table 1, are fragments of larger genes, i.e. they are nucleic acid segments. “Genes” in this context includes coding regions, non-coding regions, and mixtures of coding and non-coding regions. Accordingly, as will be appreciated by those in the art, using the sequences provided herein, extended sequences, in either direction, of the angiogenesis genes can be obtained, using techniques well known in the art for cloning either longer sequences or the full length sequences; see Ausubel, et al., supra. Much can be done by informatics and many sequences can be clustered to include multiple sequences, e.g., systems such as UniGene (see, http://www.ncbi.nlm.nih.gov/UniGene/).

[0123] Once the angiogenesis nucleic acid is identified, it can be cloned and, if necessary, its constituent parts recombined to form the entire angiogenesis nucleic acid coding regions or the entire mRNA sequence. Once isolated from its natural source, e.g., contained within a plasmid or other vector or excised therefrom as a linear nucleic acid segment, the recombinant angiogenesis nucleic acid can be further-used as a probe to identify and isolate other angiogenesis nucleic acids, for example extended coding regions. It can also be used as a “precursor” nucleic acid to make modified or variant angiogenesis nucleic acids and proteins.

[0124] The angiogenesis nucleic acids of the present invention are used in several ways. In a first embodiment, nucleic acid probes to the angiogenesis nucleic acids are made and attached to biochips to be used in screening and diagnostic methods, as outlined below, or for administration, for example for gene therapy, vaccine, and/or antisense applications. Alternatively, the angiogenesis nucleic acids that include coding regions of angiogenesis proteins can be put into expression vectors for the expression of angiogenesis proteins, again for screening purposes or for administration to a patient.

[0125] In a preferred embodiment, nucleic acid probes to angiogenesis nucleic acids (both the nucleic acid sequences outlined in the figures and/or the complements thereof) are made. The nucleic acid probes attached to the biochip are designed to be substantially complementary to the angiogenesis nucleic acids, i.e. the target sequence (either the target sequence of the sample or to other probe sequences, for example in sandwich assays), such that hybridization of the target sequence and the probes of the present invention occurs. As outlined below, this complementarity need not be perfect; there may be any number of base pair mismatches which will interfere with hybridization between the target sequence and the single stranded nucleic acids of the present invention. However, if the number of mutations is so great that no hybridization can occur under even the least stringent of hybridization conditions, the sequence is not a complementary target sequence. Thus, by “substantially complementary” herein is meant that the probes are sufficiently complementary to the target sequences to hybridize under normal reaction conditions, particularly high stringency conditions, as outlined herein.

[0126] A nucleic acid probe is generally single stranded but can be partially single and partially double stranded. The strandedness of the probe is dictated by the structure, composition, and properties of the target sequence. In general, the nucleic acid probes range from about 8 to about 100 bases long, with from about 10 to about 80 bases being preferred, and from about 30 to about 50 bases being particularly preferred. That is, generally whole genes are not used. In some embodiments, much longer nucleic acids can be used, up to hundreds of bases.

[0127] In a preferred embodiment, more than one probe per sequence is used, with either overlapping probes or probes to different sections of the target being used. That is, two, three, four or more probes, with three being preferred, are used to build in a redundancy for a particular target. The probes can be overlapping (i.e. have some sequence in common), or separate. In some cases, PCR primers may be used to amplify signal for higher sensitivity.

[0128] As will be appreciated by those in the art, nucleic acids can be attached or immobilized to a solid support in a wide variety of ways. By “inunobilized” and grammatical equivalents herein is meant the association or binding between the nucleic acid probe and the solid support is sufficient to be stable under the conditions of binding, washing, analysis, and removal as outlined below. The binding can typically be covalent or non-covalent. By “non-covalent binding” and grammatical equivalents herein is meant one or more of electrostatic, hydrophilic, and hydrophobic interactions. Included in non-covalent binding is the covalent attachment of a molecule, such as, streptavidin to the support and the non-covalent binding of the biotinylated probe to the streptavidin. By “covalent binding” and grammatical equivalents herein is meant that the two moieties, the solid support and the probe, are attached by at least one bond, including sigma bonds, pi bonds and coordination bonds. Covalent bonds can be formed directly between the probe and the solid support or can be formed by a cross linker or by inclusion of a specific reactive group on either the solid support or the probe or both molecules. Immobilization may also involve a combination of covalent and non-covalent interactions.

[0129] In general, the probes are attached to the biochip in a wide variety of ways, as will be appreciated by those in the art. As described herein, the nucleic acids can either be synthesized first, with subsequent attachment to the biochip, or can be directly synthesized on the biochip.

[0130] The biochip comprises a suitable solid substrate. By “substrate” or “solid support” or other grammatical equivalents herein is meant a material that can be modified to contain discrete individual sites appropriate for the attachment or association of the nucleic acid probes and is amenable to at least one detection method. As will be appreciated by those in the art, the number of possible substrates are very large, and include, but are not limited to, glass and modified or functionalized glass, plastics (including acrylics, polystyrene and copolymers of styrene and other materials, polypropylene, polyethylene, polybutylene, polyurethanes, TeflonJ, etc.), polysaccharides, nylon or nitrocellulose, resins, silica or silica-based materials including silicon and modified silicon, carbon, metals, inorganic glasses, plastics, etc. In general, the substrates allow optical detection and do not appreciably fluorescese. A preferred substrate is described in copending application entitled Reusable Low Fluorescent Plastic Biochip, U.S. application Ser. No. 09/270,214, filed Mar. 15, 1999, herein incorporated by reference in its entirety.

[0131] Generally the substrate is planar, although as will be appreciated by those in the art, other configurations of substrates may be used as well. For example, the probes may be placed on the inside surface of a tube, for flow-through sample analysis to minimize sample volume. Similarly, the substrate may be flexible, such as a flexible foam, including closed cell foams made of particular plastics.

[0132] In a preferred embodiment, the surface of the biochip and the probe may be derivatized with chemical functional groups for subsequent attachment of the two. Thus, for example, the biochip is derivatized with a chemical functional group including, but not limited to, amino groups, carboxy groups, oxo groups and thiol groups, with amino groups being particularly preferred. Using these functional groups, the probes can be attached using functional groups on the probes. For example, nucleic acids containing amino groups can be attached to surfaces comprising amino groups, for example using linkers as are known in the art; for example, homo-or hetero-bifunctional linkers as are well known (see 1994 Pierce Chemical Company catalog, technical section on cross-linkers, pages 155-200, incorporated herein by reference). In addition, in some cases, additional linkers, such as alkyl groups (including substituted and heteroalkyl groups) may be used.

[0133] In this embodiment, oligonucleotides are synthesized as is known in the art, and then attached to the surface of the solid support. As will be appreciated by those skilled in the art, either the 5′ or 3′ terminus may be attached to the solid support, or attachment may be via an internal nucleoside.

[0134] In another embodiment, the immobilization to the solid support may be very strong, yet non-covalent. For example, biotinylated oligonucleotides can be made, which bind to surfaces covalently coated with streptavidin, resulting in attachment.

[0135] Alternatively, the oligonucleotides may be synthesized on the surface, as is known in the art. For example, photoactivation techniques utilizing photopolymerization compounds and techniques are used. In a preferred embodiment, the nucleic acids can be synthesized in situ, using well known photolithographic techniques, such as those described in WO 95/25116; WO 95/35505; U.S. Pat. Nos. 5,700,637 and 5,445,934; and references cited within, all of which are expressly incorporated by reference; these methods of attachment form the basis of the Affimetrix GeneChip™ technology.

[0136] Often, amplification-based assays are performed to measure the expression level of angiogenesis-associated sequences. These assays are typically performed in conjunction with reverse transcription. In such assays, an angiogenesis-associated nucleic acid sequence acts as a template in an amplification reaction (e.g., Polymerase Chain Reaction, or PCR). In a quantitative amplification, the amount of amplification product will be proportional to the amount of template in the original sample. Comparison to appropriate controls provides a measure of the amount of angiogenesis-associated RNA Methods of quantitative amplification are well known to those of skill in the art. Detailed protocols for quantitative PCR are provided, e.g., in Innis et al. (1990) PCR Protocols, A Guide to Methods and Applications, Academic Press, Inc. N.Y.).

[0137] In some embodiments, a TaqMan based assay is used to measure expression. TaqMan based assays use a fluorogenic oligonucleotide probe that contains a 5′ fluorescent dye and a 3′ quenching agent. The probe hybridizes to a PCR product, but cannot itself be extended due to a blocking agent at the 3′ end. Then the PCR product is amplified in subsequent cycles, the 5′ nuclease activity of the polymerase, e.g., AmpliTaq, results in the cleavage of the TaqMan probe. This cleavage separates the 5′ fluorescent dye and the 3′ quenching agent, thereby resulting in an increase in fluorescence as a function of amplification (see, for example, literature provided by Perkin-Elmer, e.g., www2.perkin-elmer.com).

[0138] Other suitable amplification methods include, but are not limited to, ligase chain reaction (LCR) (see, Wu and Wallace (1989) Genomics 4: 560, Landegren et al. (1988) Science 241: 1077, and Barringer et al. (1990) Gene 89: 117), transcription amplification (Kwoh et al. (1989) Proc. Natl. Acad. Sci. USA 86: 1173), self-sustained sequence replication (Guatelli et al. (1990) Proc. Nat. Acad. Sci. USA 87: 1874), dot PCR, and linker adapter PCR, etc.

[0139] In a preferred embodiment, angiogenesis nucleic acids, e.g., encoding angiogenesis proteins are used to make a variety of expression vectors to express angiogenesis proteins which can then be used in screening assays, as described below. Expression vectors and recombinant DNA technology are well known to those of skill in the art (see, e.g., Ausubel, supra, and Gene Expression Systems, Fernandez & Hoeffler, Eds, Academic Press, 1999) and are used to express proteins. The expression vectors may be either self-replicating extrachromosomal vectors or vectors which integrate, into a host genome. Generally, these expression vectors include transcriptional and translational regulatory nucleic acid operably linked to the nucleic acid encoding the angiogenesis protein. The term “control sequences” refers to DNA sequences used for the expression of an operably linked coding sequence in a particular host organism. Control sequences that are suitable for prokaryotes, for example, include a promoter, optionally an operator sequence, and a ribosome binding site. Eukaryotic cells are known to utilize promoters, polyadenylation signals, and enhancers.

[0140] Nucleic acid is “operably linked” when it is placed into a functional relationship with another nucleic acid sequence. For example, DNA for a presequence or secretory leader is operably linked to DNA for a polypeptide if it is expressed as a preprotein that participates in the secretion of the polypeptide; a promoter or enhancer is operably linked to a coding sequence if it affects the transcription of the sequence; or a ribosome binding site is operably linked to a coding sequence if it is positioned so as to facilitate translation. Generally, “operably linked” means that the DNA sequences being linked are contiguous, and, in the case of a secretory leader, contiguous and in reading phase. However, enhancers do not have to be contiguous. Linking is typically accomplished by ligation at convenient restriction sites. If such sites do not exist, synthetic oligonucleotide adaptors or linkers are used in accordance with conventional practice. Transcriptional and translational regulatory nucleic acid will generally be appropriate to the host cell used to express the angiogenesis protein; for example, transcriptional and translational regulatory nucleic acid sequences from Bacillus are preferably used to express the angiogenesis protein in Bacillus. Numerous types of appropriate expression vectors, and suitable regulatory sequences are known in the art for a variety of host cells.

[0141] In general, transcriptional and translational regulatory sequences may include, but are not limited to, promoter sequences, ribosomal binding sites, transcriptional start and stop sequences, translational start and stop sequences, and enhancer or activator sequences. In a preferred embodiment, the regulatory sequences include a promoter and transcriptional start and stop sequences.

[0142] Promoter sequences encode either constitutive or inducible promoters. The promoters may be either naturally occurring promoters or hybrid promoters. Hybrid promoters, which combine elements of more than one promoter, are also known in the art, and are useful in the present invention.

[0143] In addition, an expression vector may comprise additional elements. For example, the expression vector may have two replication systems, thus allowing it to be maintained in two organisms, for example in mammalian or insect cells for expression and in a procaryotic host for cloning and amplification. Furthermore, for integrating expression vectors, the expression vector contains at least one sequence homologous to the host cell genome, and preferably two homologous sequences which flank the expression construct. The integrating vector may be directed to a specific locus in the host cell by selecting the appropriate homologous sequence for inclusion in the vector. Constructs for integrating vectors are well known in the art (e.g., Fernandez & Hoeffler, supra).

[0144] In addition, in a preferred embodiment, the expression vector contains a selectable marker gene to allow the selection of transformed host cells. Selection genes are well known in the art and will vary with the host cell used.

[0145] The angiogenesis proteins of the present invention are produced by culturing a host cell transformed with an expression vector containing nucleic acid encoding an angiogenesis protein, under the appropriate conditions to induce or cause expression of the angiogenesis protein. Conditions appropriate for angiogenesis protein expression will vary with the choice of the expression vector and the host cell, and will be easily ascertained by one skilled in the art through routine experimentation or optimization. For example, the use of constitutive promoters in the expression vector will require optimizing the growth and proliferation of the host cell, while the use of an inducible promoter requires the appropriate growth conditions for induction. In addition, in some embodiments, the timing of the harvest is important. For example, the baculoviral systems used in insect cell expression are lytic viruses, and thus harvest time selection can be crucial for product yield.

[0146] Appropriate host cells include yeast, bacteria, archaebacteria, fungi, and insect and animal cells, including mammalian cells. Of particular interest are Saccharomyces cerevisiae and other yeasts, E. coli, Bacillus subtilis, Sf9 cells, C129 cells, 293 cells, Neurospora, BHK, CHO, COS, HeLa cells, HUVEC (human umbilical vein endothelial cells), THP1 cells (a macrophage cell line) and various other human cells and cell lines.

[0147] In a preferred embodiment, the angiogenesis proteins are expressed in mammalian cells. Mammalian expression systems are also known in the art, and include retroviral and adenoviral systems. Of particular use as mammalian promoters are the promoters from mammalian viral genes, since the viral genes are often highly expressed and have a broad host range. Examples include the SV40 early promoter, mouse mammary tumor virus LTR promoter, adenovirus major late promoter, herpes simplex virus promoter, and the CMV promoter (see, e.g., Fernandez & Hoeffler, supra). Typically, transcription termination and polyadenylation sequences recognized by mammalian cells are regulatory regions located 3′ to the translation stop codon and thus, together with the promoter elements, flank the coding sequence. Examples of transcription terminator and polyadenlytion signals include those derived form SV40.

[0148] The methods of introducing exogenous nucleic acid into mammalian hosts, as well as other hosts, is well known in the art, and will vary with the host cell used. Techniques include dextran-mediated transfection, calcium phosphate precipitation, polybrene mediated transfection, protoplast fusion, electroporation, viral infection, encapsulation of the polynucleotide(s) in liposomes, and direct microinjection of the DNA into nuclei.

[0149] In a preferred embodiment, angiogenesis proteins are expressed in bacterial systems. Bacterial expression systems are well known in the art. Promoters from bacteriophage may also be used and are known in the art. In addition, synthetic promoters and hybrid promoters are also useful; for example, the tac promoter is a hybrid of the trp and lac promoter sequences. Furthermore, a bacterial promoter can include naturally occurring promoters of non-bacterial origin that have the ability to bind bacterial RNA polymerase and initiate transcription. In addition to a functioning promoter sequence, an efficient ribosome binding site is desirable. The expression vector may also include a signal peptide sequence that provides for secretion of the angiogenesis protein in bacteria. The protein is either secreted into the growth media (gram-positive bacteria) or into the periplasmic space, located between the inner and outer membrane of the cell (gram-negative bacteria). The bacterial expression vector may also include a selectable marker gene to allow for the selection of bacterial strains that have been transformed. Suitable selection genes include genes which render the bacteria resistant to drugs such as ampicillin, chloramphenicol, erythromycin, kanamycin, neomycin and tetracycline. Selectable markers also include biosynthetic genes, such as those in the histidine, tryptophan and leucine biosynthetic pathways. These components are assembled into expression vectors. Expression vectors for bacteria are well known in the art, and include vectors for Bacillus subtilis, E. coli, Streptococcus cremoris, and Streptococcus lividans, among others (e.g., Fernandez & Hoeffler, supra). The bacterial expression vectors are transformed into bacterial host cells using techniques well known in the art, such as calcium chloride treatment, electroporation, and others.

[0150] In one embodiment, angiogenesis proteins are produced in insect cells. Expression vectors for the transformation of insect cells, and in particular, baculovirus-based expression vectors, are well known in the art.

[0151] In a preferred embodiment, angiogenesis protein is produced in yeast cells. Yeast expression systems are well known in the art, and include expression vectors for Saccharomyces cerevisiae, Candida albicans and C. maltosa, Hansenula polymorpha, Kluyveromyces fragilis and K lactis, Pichia guillerimondii and P. pastoris, Schizosaccharomyces pombe, and Yarrowia lipolytica.

[0152] The angiogenesis protein may also be made as a fusion protein, using techniques well known in the art. Thus, for example, for the creation of monoclonal antibodies, if the desired epitope is small, the angiogenesis protein may be fused to a carrier protein to form an immunogen. Alternatively, the angiogenesis protein may be made as a fusion protein to increase expression, or for other reasons. For example, when the angiogenesis protein is an angiogenesis peptide, the nucleic acid encoding the peptide may be linked to other nucleic acid for expression purposes.

[0153] In one embodiment, the angiogenesis nucleic acids, proteins and antibodies of the invention are labeled. By “labeled” herein is meant that a compound has at least one element, isotope or chemical compound attached to enable the detection of the compound. In general, labels fall into three classes: a) isotopic labels, which may be radioactive or heavy isotopes; b) immune labels, which may be antibodies or antigens; and c) colored or fluorescent dyes. The labels may be incorporated into the angiogenesis nucleic acids, proteins and antibodies at any position. For example, the label should be capable of producing, either directly or indirectly, a detectable signal. The detectable moiety may be a radioisotope, such as ³H, ¹⁴C, ³²P, ³⁵S, or ¹²⁵I, a fluorescent or chemiluminescent compound, such as fluorescein isothiocyanate, rhodamine, or luciferin, or an enzyme, such as alkaline phosphatase, beta-galactosidase or horseradish peroxidase. Any method known in the art for conjugating the antibody to the label may be employed, including those methods described by Hunter et al., Nature, 144:945 (1962); David et al., Biochemistry, 13:1014 (1974); Pain et al., J. Immunol. Meth., 40:219 (1981); and Nygren, J. Histochem. and Cytochem., 30:407 (1982).

[0154] Accordingly, the present invention also provides angiogenesis protein sequences. An angiogenesis protein of the present invention may be identified in several ways. “Protein” in this sense includes proteins, polypeptides, and peptides. As will be appreciated by those in the art, the nucleic acid sequences of the invention can be used to generate protein sequences. There are a variety of ways to do this, including cloning the entire gene and verifying its frame and amino acid sequence, or by comparing it to known sequences to search for homology to provide a frame, assuming the angiogenesis protein has an identifiable motif or homology to some protein in the database being used. Generally, the nucleic acid sequences are input into a program that will search all three frames for homology. This is done in a preferred embodiment using the following NCBI Advanced BLAST parameters. The program is blastx or blastn. The database is nr. The input data is as “Sequence in FASTA format”. The organism list is “none”. The “expect” is 10; the filter is default. The “descriptions” is 500, the “alignments” is 500, and the “alignment view” is pairwise. The “Query Genetic Codes” is standard (1). The matrix is BLOSUM62; gap existence cost is 11, per residue gap cost is 1; and the lambda ratio is 0.85 default. This results in the generation of a putative protein sequence.

[0155] Also included within one embodiment of angiogenesis proteins are amino acid variants of the naturally occurring sequences, as determined herein. Preferably, the variants are preferably greater than about 75% homologous to the wild-type sequence, more preferably greater than about 80%, even more preferably greater than about 85% and most preferably greater than 90%. In some embodiments the homology will be as high as about 93 to 95 or 98%. As for nucleic acids, homology in this context means sequence similarity or identity, with identity being preferred. This homology will be determined using standard techniques well known in the art as are outlined above for the nucleic acid homologies.

[0156] Angiogenesis proteins of the present invention may be shorter or longer than the wild type amino acid sequences. Thus, in a preferred embodiment, included within the definition of angiogenesis proteins are portions or fragments of the wild type sequences. herein. In addition, as outlined above, the angiogenesis nucleic acids of the invention may be used to obtain additional coding regions, and thus additional protein sequence, using techniques known in the art.

[0157] In a preferred embodiment, the angiogenesis proteins are derivative or variant angiogenesis proteins as compared to the wild-type sequence. That is, as outlined more fully below, the derivative angiogenesis peptide will often contain at least one amino acid substitution, deletion or insertion, with amino acid substitutions being particularly preferred. The amino acid substitution, insertion or deletion may occur at any residue within the angiogenesis peptide.

[0158] Also included within one embodiment of angiogenesis proteins of the present invention are amino acid sequence variants. These variants typically fall into one or more of three classes: substitutional, insertional or deletional variants. These variants ordinarily are prepared by site specific mutagenesis of nucleotides in the DNA encoding the angiogenesis protein, using cassette or PCR mutagenesis or other techniques well known in the art, to produce DNA encoding the variant, and thereafter expressing the DNA in recombinant cell culture as outlined above. However, variant angiogenesis protein fragments having up to about 100-150 residues may be prepared by in vitro synthesis using established techniques. Amino acid sequence variants are characterized by the predetermined nature of the variation, a feature that sets them apart from naturally occurring allelic or interspecies variation of the angiogenesis protein amino acid sequence. The variants typically exhibit the same qualitative biological activity as the naturally occurring analogue, although variants can also be selected which have modified characteristics as will be more fully outlined below.

[0159] While the site or region for introducing an amino acid sequence variation is predetermined, the mutation per se need not be predetermined. For example, in order to optimize the performance of a mutation at a given site, random mutagenesis may be conducted at the target codon or region and the expressed angiogenesis variants screened for the optimal combination of desired activity. Techniques for making substitution mutations at predetermined sites in DNA having a known sequence are well known, for example, M13 primer mutagenesis and PCR mutagenesis. Screening of the mutants is done using assays of angiogenesis protein activities.

[0160] Amino acid substitutions are typically of single residues; insertions usually will be on the order of from about 1 to 20 amino acids, although considerably larger insertions may be tolerated. Deletions range from about 1 to about 20 residues, although in some cases deletions may be much larger.

[0161] Substitutions, deletions, insertions or any combination thereof may be used to arrive at a final derivative. Generally these changes are done on a few amino acids to minimize the alteration of the molecule. However, larger changes may be tolerated in certain circumstances. When small alterations in the characteristics of the angiogenesis protein are desired, substitutions are generally made in accordance with the amino acid substitution chart provided in the definition section.

[0162] Substantial changes in function or immunological identity are made by selecting substitutions that are less conservative than those provided in the definition of “conservative substitution”. For example, substitutions may be made which more significantly affect: the structure of the polypeptide backbone in the area of the alteration, for example the alpha-helical or beta-sheet structure; the charge or hydrophobicity of the molecule at the target site; or the bulk of the side chain. The substitutions which in general are expected to produce the greatest changes in the polypeptide's properties are those in which (a) a hydrophilic residue, e.g. seryl or threonyl, is substituted for (or by) a hydrophobic residue, e.g. leucyl, isoleucyl, phenylalanyl, valyl or alanyl; (b) a cysteine or proline is substituted for (or by) any other residue; (c) a residue having an electropositive side chain, e.g. lysyl, arginyl, or histidyl, is substituted for (or by) an electronegative residue, e.g. glutamyl or aspartyl; or (d) a residue having a bulky side chain, e.g. phenylalanine, is substituted for (or by) one not having a side chain, e.g. glycine.

[0163] The variants typically exhibit the same qualitative biological activity and will elicit the same immune response as the naturally-occurring analog, although variants also are selected to modify the characteristics of the angiogenesis proteins as needed. Alternatively, the variant may be designed such that the biological activity of the angiogenesis protein is altered. For example, glycosylation sites may be altered or removed.

[0164] Covalent modifications of angiogenesis polypeptides are included within the scope of this invention. One type of covalent modification includes reacting targeted amino acid residues of an angiogenesis polypeptide with an organic derivatizing agent that is capable of reacting with selected side chains or the N-or C-terminal residues of an angiogenesis polypeptide. Derivatization with bifunctional agents is useful, for instance, for crosslinking angiogenesis polypeptides to a water-insoluble support matrix or surface for use in the method for purifying anti-angiogenesis polypeptide antibodies or screening assays, as is more fully described below. Commonly used crosslinking agents include, e.g., 1,1-bis(diazoacetyl)-2-phenylethane, glutaraldehyde, N-hydroxysuccinimide esters, for example, esters with 4-azidosalicylic acid, homobifunctional imidoesters, including disuccinimidyl esters such as 3,3′-dithiobis(succinimidylpropionate), bifunctional maleimides such as bis-N-maleimido-1,8-octane and agents such as methyl-3-[(p-azidophenyl)dithio]propioimidate.

[0165] Other modifications include deamidation of glutaminyl and asparaginyl residues to the corresponding glutamyl and aspartyl residues, respectively, hydroxylation of proline and lysine, phosphorylation of hydroxyl groups of seryl, threonyl or tyrosyl residues, methylation of the γ-amino groups of lysine, arginine, and histidine side chains [T. E. Creighton, Proteins: Structure and Molecular Properties, W.H. Freeman & Co., San Francisco, pp. 79-86 (1983)], acetylation of the N-terminal amine, and amidation of any C-terminal carboxyl group.

[0166] Another type of covalent modification of the angiogenesis polypeptide included within the scope of this invention comprises altering the native glycosylation pattern of the polypeptide. “Altering the native glycosylation pattern” is intended for purposes herein to mean deleting one or more carbohydrate moieties found in native sequence angiogenesis polypeptide, and/or adding one or more glycosylation sites that are not present in the native sequence angiogenesis polypeptide. Glycosylation patterns can be altered in many ways. For example the use of different cell types to express angiogenesis-associated sequences can result in different glycosylation patterns.

[0167] Addition of glycosylation sites to angiogenesis polypeptides may also be accomplished by altering the amino acid sequence thereof. The alteration may be made, for example, by the addition of, or substitution by, one or more serine or threonine residues to the native sequence angiogenesis polypeptide (for O-linked glycosylation sites). The angiogenesis amino acid sequence may optionally be altered through changes at the DNA level, particularly by mutating the DNA encoding the angiogenesis polypeptide at preselected bases such that codons are generated that will translate into the desired amino acids.

[0168] Another means of increasing the number of carbohydrate moieties on the angiogenesis polypeptide is by chemical or enzymatic coupling of glycosides to the polypeptide. Such methods are described in the art, e.g., in WO 87/05330 published Sep. 11, 1987, and in Aplin and Wriston, CRC Crit. Rev. Biochem., pp. 259-306 (1981).

[0169] Removal of carbohydrate moieties present on the angiogenesis polypeptide may be accomplished chemically or enzymatically or by mutational substitution of codons encoding for amino acid residues that serve as targets for glycosylation. Chemical deglycosylation techniques are known in the art and described, for instance, by Hakimuddin, et al., Arch. Biochem. Biophys., 259:52 (1987) and by Edge et al., Anal. Biochem., 118:131 (1981). Enzymatic cleavage of carbohydrate moieties on polypeptides can be achieved by the use of a variety of endo-and exo-glycosidases as described by Thotakura et al., Meth. Enzymol., 138:350 (1987).

[0170] Another type of covalent modification of angiogenesis comprises linking the angiogenesis polypeptide to one of a variety of nonproteinaceous polymers, e.g., polyethylene glycol, polypropylene glycol, or polyoxyalkylenes, in the manner set forth in U.S. Pat. Nos. 4,640,835; 4,496,689; 4,301,144; 4,670,417; 4,791,192 or 4,179,337.

[0171] Angiogenesis polypeptides of the present invention may also be modified in a way to form chimeric molecules comprising an angiogenesis polypeptide fused to another, heterologous polypeptide or amino acid sequence. In one embodiment, such a chimeric molecule comprises a fusion of an angiogenesis polypeptide with a tag polypeptide which provides an epitope to which an anti-tag antibody can selectively bind. The epitope tag is generally placed at the amino-or carboxyl-terminus of the angiogenesis polypeptide. The presence of such epitope-tagged forms of an angiogenesis polypeptide can be detected using an antibody against the tag polypeptide. Also, provision of the epitope tag enables the angiogenesis polypeptide to be readily purified by affinity purification using an anti-tag antibody or another type of affinity matrix that binds to the epitope tag. In an alternative embodiment, the chimeric molecule may comprise a fusion of an angiogenesis polypeptide with an immunoglobulin or a particular region of an immunoglobulin. For a bivalent form of the chimeric molecule, such a fusion could be to the Fc region of an IgG molecule.

[0172] Various tag polypeptides and their respective antibodies are well known in the art. Examples include poly-histidine (poly-his).or poly-histidine-glycine (poly-his-gly) tags; HIS6 and metal chelation tags, the flu HA tag polypeptide and its antibody 12CA5 [Field et al., Mol. Cell. Biol., 8:2159-2165 (1988)]; the c-myc tag and the 8F9, 3C7, 6E10, G4, B7 and 9E10 antibodies thereto [Evan et al., Molecular and Cellular Biology, 5:3610-3616 (1985)]; and the Herpes Simplex virus glycoprotein D (gD) tag and its antibody [Paborsky et al., Protein Engineering, 3(6):547-553 (1990)]. Other tag polypeptides include the Flag-peptide [Hopp et al., BioTechnology, 6:1204-1210 (1988)]; the KT3 epitope peptide [Martin et al. Science, 255:192-194 (1992)]; tubulin epitope peptide [Skinner et al., J. Biol. Chem., 266:15163-15166 (1991)]; and the T7 gene 10 protein peptide tag [Lutz-Freyermuth et al., Proc. Natl. Acad. Sci. USA, 87:6393-6397 (1990)].

[0173] Also included with an embodiment of angiogenesis protein are other angiogenesis proteins of the angiogenesis family, and angiogenesis proteins from other organisms, which are cloned and expressed as outlined below. Thus, probe or degenerate polymerase chain reaction (PCR) primer sequences may be used to find other related angiogenesis proteins from humans or other organisms. As will be appreciated by those in the art, particularly useful probe and/or PCR primer sequences include the unique areas of the angiogenesis nucleic acid sequence. As is generally known in the art, preferred PCR primers are from about 15 to about 35 nucleotides in length, with from about 20 to about 30 being preferred, and may contain inosine as needed. The conditions for the PCR reaction are well known in the art (e.g., Innis, PCR Protocols, supra).

[0174] In addition, as is outlined herein, angiogenesis proteins can be made that are longer than those encoded by the nucleic acids of the figures, e.g., by the elucidation of extended sequences, the addition of epitope or purification tags, the addition of other fusion sequences, etc.

[0175] Angiogenesis proteins may also be identified as being encoded by angiogenesis nucleic acids. Thus, angiogenesis proteins are encoded by nucleic acids that will hybridize to the sequences of the sequence listings, or their complements, as outlined herein.

[0176] In a preferred embodiment, when the angiogenesis protein is to be used to generate antibodies, e.g., for immunotherapy or immunodiagnosis, the angiogenesis protein should share at least one epitope or determinant with the full length protein. By “epitope” or “determinant” herein is typically meant a portion of a protein which will generate and/or bind an antibody or T-cell receptor in the context of MHC. Thus, in most instances, antibodies made to a smaller angiogenesis protein will be able to bind to the full-length protein, particularly linear epitopes. In a preferred embodiment, the epitope is unique; that is, antibodies generated to a unique epitope show little or no cross-reactivity. In a preferred embodiment, the epitope is selected from a protein sequence set out in Table 2.

[0177] Methods of preparing polyclonal antibodies are known to the skilled artisan (e.g., Coligan, supra; and Harlow & Lane, supra). Polyclonal antibodies can be raised in a mammal, e.g., by one or more injections of an immunizing agent and, if desired, an adjuvant. Typically, the immunizing agent and/or adjuvant will be injected in the mammal by multiple subcutaneous or intraperitoneal injections. The immunizing agent may include a protein encoded by a nucleic acid of the figures or fragment thereof or a fusion protein thereof. It may be useful to conjugate the immunizing agent to a protein known to be immunogenic in the mammal being immunized. Examples of such immunogenic proteins include but are not limited to keyhole limpet hemocyanin, serum albumin, bovine thyroglobulin, and soybean trypsin inhibitor. Examples of adjuvants which may be employed include Freund's complete adjuvant and MPL-TDM adjuvant (monophosphoryl Lipid A, synthetic trehalose dicorynomycolate). The immunization protocol may be selected by one skilled in the art without undue experimentation.

[0178] The antibodies may, alternatively, be monoclonal antibodies. Monoclonal antibodies may be prepared using hybridoma methods, such as those described by Kohler and Milstein, Nature, 256:495 (1975). In a hybridoma method, a mouse, hamster, or other appropriate host animal, is typically immunized with an immunizing agent to elicit lymphocytes that produce or are capable of producing antibodies that will specifically bind to the immunizing agent. Alternatively, the lymphocytes may be immunized in vitro. The immunizing agent will typically include a polypeptide encoded by a nucleic acid of Table 1, or fragment thereof, or a fusion protein thereof. Generally, either peripheral blood lymphocytes (“PBLs”) are used if cells of human origin are desired, or spleen cells or lymph node cells are used if non-human mammalian sources are desired. The lymphocytes are then fused with an immortalized cell line using a suitable fusing agent, such as polyethylene glycol, to form a hybridoma cell [Goding, Monoclonal Antibodies: Principles and Practice, Academic Press, (1986) pp. 59-103]. Immortalized cell lines are usually transformed mammalian cells, particularly myeloma cells of rodent, bovine and human origin. Usually, rat or mouse myeloma cell lines are employed. The hybridoma cells may be cultured in a suitable culture medium that preferably contains one or more substances that inhibit the growth or survival of the unfused, immortalized cells. For example, if the parental cells lack the enzyme hypoxanthine guanine phosphoribosyl transferase (HGPRT or HPRT), the culture medium for the hybridomas typically will include hypoxanthine, aminopterin, and thymidine (“HAT medium”), which substances prevent the growth of HGPRT-deficient cells.

[0179] In one embodiment; the antibodies are bispecific antibodies. Bispecific antibodies are monoclonal, preferably human or humanized, antibodies that have binding specificities for at least two different antigens or that have binding specificities for two epitopes on the same antigen. In one embodiment, one of the binding specificities is for a protein encoded by a nucleic acid Table 1 or a fragment thereof, the other one is for any other antigen, and preferably for a cell-surface protein or receptor or receptor subunit, preferably one that is tumor specific. Alternatively, tetramer-type technology may create multivalent reagents.

[0180] In a preferred embodiment, the antibodies to angiogenesis protein are capable of reducing or eliminating a biological function of an angiogenesis protein, as is described below. That is, the addition of anti-angiogenesis protein antibodies (either polyclonal or preferably monoclonal) to angiogenic tissue (or cells containing angiogenesis) may reduce or eliminate the angiogenesis activity. Generally, at least a 25% decrease in activity is preferred, with at least about 50% being particularly preferred and about a 95-100% decrease being especially preferred.

[0181] In a preferred embodiment the antibodies to the angiogenesis proteins are humanized antibodies (e.g., Xenerex Biosciences, Mederex, Inc., Abgenix, Inc., Protein Design Labs,Inc.) Humanized forms of non-human (e.g., murine) antibodies are chimeric molecules of immunoglobulins, immunoglobulin chains or fragments thereof (such as Fv, Fab, Fab′, F(ab′)2 or other antigen-binding subsequences of antibodies) which contain minimal sequence derived from non-human immunoglobulin. Humanized antibodies include human immunoglobulins (recipient antibody) in which residues form a complementary determining region (CDR) of the recipient are replaced by residues from a CDR of a non-human species (donor antibody) such as mouse, rat or rabbit having the desired specificity, affinity and capacity. In some instances, Fv framework residues of the human immunoglobulin are replaced by corresponding non-human residues. Humanized antibodies may also comprise residues which are found neither in the recipient antibody nor in the imported CDR or framework sequences. In general, a humanized antibody will comprise substantially all of at least one, and typically two, variable domains, in which all or substantially all of the CDR regions correspond to those of a non-human immunoglobulin and all or substantially all of the framework (FR) regions are those of a human immunoglobulin consensus sequence. The humanized antibody optimally also will comprise at least a portion of an immunoglobulin constant region (Fc), typically that of a human immunoglobulin [Jones et al., Nature, 321:522-525 (1986); Riechmann et al., Nature, 332:323-329 (1988); and Presta, Curr. Op. Struct. Biol., 2:593-596 (1992)].

[0182] Methods for humanizing non-human antibodies are well known in the art. Generally, a humanized antibody has one or more amino acid residues introduced into it from a source which is non-human. These non-human amino acid residues are often referred to as import residues, which are typically taken from an import variable domain. Humanization can be essentially performed following the method of Winter and co-workers [Jones et al., Nature, 321:522-525 (1986); Riechmann et al., Nature, 332:323-327 (1988); Verhoeyen et al., Science, 239:1534-1536 (1988)], by substituting rodent CDRs or CDR sequences for the corresponding sequences of a human antibody. Accordingly, such humanized antibodies are chimeric antibodies (U.S. Pat. No. 4,816,567), wherein substantially less than an intact human variable domain has been substituted by the corresponding sequence from a non-human species. In practice, humanized antibodies are typically human antibodies in which some CDR residues and possibly some FR residues are substituted by residues from analogous sites in rodent antibodies.

[0183] Human antibodies can also be produced using various techniques known in the art, including phage display libraries [Hoogenboom and Winter, J. Mol. Biol., 227:381 (1991); Marks et al., J. Mol. Biol., 222:581 (1991)]. The techniques of Cole et al. and Boemer et al. are also available for the preparation of human monoclonal antibodies (Cole et al., Monoclonal Antibodies and Cancer Therapy, Alan R. Liss, p. 77 (1985) and Boerner et al., J. Immunol., 147(1):86-95 (1991)]. Similarly, human antibodies can be made by introducing of human immunoglobulin loci into transgenic animals, e.g., mice in which the endogenous immunoglobulin genes have been partially or completely inactivated. Upon challenge, human antibody production is observed, which closely resembles that seen in humans in all respects, including gene rearrangement, assembly, and antibody repertoire. This approach is described, for example, in U.S. Pat. Nos. 5,545,807; 5,545,806; 5,569,825; 5,625,126; 5,633,425; 5,661,016, and in the following scientific publications: Marks et al., Bio/Technology 10, 779-783 (1992); Lonberg et al., Nature 368 856-859 (1994); Morrison, Nature 368, 812-13 (1994); Fishwild et al., Nature Biotechnology 14, 845-51 (1996); Neuberger, Nature Biotechnology 14, 826 (1996); Lonberg and Huszar, Intern. Rev. Immunol. 13 65-93 (1995).

[0184] By immunotherapy is meant treatment of angiogenesis with an antibody raised against angiogenesis proteins. As used herein, immunotherapy can be passive or active. Passive immunotherapy as defined herein is the passive transfer of antibody to a recipient (patient). Active immunization is the induction of antibody and/or T-cell responses in a recipient (patient). Induction of an immune response is the result of providing the recipient with an antigen to which antibodies are raised. As appreciated by one of ordinary skill in the art, the antigen may be provided by injecting a polypeptide against which antibodies are desired to be raised into a recipient, or contacting the recipient with a nucleic acid capable of expressing the antigen and under conditions for expression of the antigen, leading to an immune response.

[0185] In a preferred embodiment the angiogenesis proteins against which antibodies are raised are secreted proteins as described above. Without being bound by theory, antibodies used for treatment, bind and prevent the secreted protein from binding to its receptor, thereby inactivating the secreted angiogenesis protein.

[0186] In another preferred embodiment, the angiogenesis protein to which antibodies are raised is a transmembrane protein. Without being bound by theory, antibodies used for treatment, bind the extracellular domain of the angiogenesis protein and prevent it from binding to other proteins, such as circulating ligands or cell-associated molecules. The antibody may cause down-regulation of the transmembrane angiogenesis protein. As will be appreciated by one of ordinary skill in the art, the antibody may be a competitive, non-competitive or uncompetitive inhibitor of protein binding to the extracellular domain of the angiogenesis protein. The antibody is also an antagonist of the angiogenesis protein. Further, the antibody prevents activation of the transmembrane angiogenesis protein. In one aspect, when the antibody prevents the binding of other molecules to the angiogenesis protein, the antibody prevents growth of the cell. The antibody may also be used to target or sensitize the cell to cytotoxic agents, including, but not limited to TNF-α, TNF-β, IL-1, INF-γ and IL-2, or chemotherapeutic agents including 5FU, vinblastine, actinomycin D, cisplatin, methotrexate, and the like. In some instances the antibody belongs to a sub-type that activates serum complement when complexed with the transmembrane protein thereby mediating cytotoxicity or antigen-dependent cytotoxicity (ADCC). Thus, angiogenesis is treated by administering to a patient antibodies directed against the transmembrane angiogenesis protein. Antibody-labeling may activate a co-toxin, localize a toxin payload, or otherwise provide means to locally ablate cells.

[0187] In another preferred embodiment, the antibody is conjugated to an effector moiety. The effector moiety can be any number of molecules, including labelling moieties such as radioactive labels or fluorescent labels, or can be a therapeutic moiety. In one aspect the therapeutic moiety is a small molecule that modulates the activity of the angiogenesis protein. In another aspect the therapeutic moiety modulates the activity of molecules associated with or in close proximity to the angiogenesis protein. The therapeutic moiety may inhibit enzymatic activity such as protease or collagenase activity associated with angiogenesis.

[0188] In a preferred embodiment, the therapeutic moiety can also be a cytotoxic agent. In this method, targeting the cytotoxic agent to angiogenesis tissue or cells, results in a reduction in the number of afflicted cells, thereby reducing symptoms associated with angiogenesis. Cytotoxic agents are numerous and varied and include, but are not limited to, cytotoxic drugs or toxins or active fragments of such toxins. Suitable toxins and their corresponding fragments include diphtheria A chain, exotoxin A chain, ricin A chain, abrin A chain, curcin, crotin, phenomycin, enomycin and the like. Cytotoxic agents also include radiochemicals made by conjugating radioisotopes to antibodies raised against angiogenesis proteins, or binding of a radionuclide to a chelating agent that has been covalently attached to the antibody. Targeting the therapeutic moiety to transmembrane angiogenesis proteins not only serves to increase the local concentration of therapeutic moiety in the angiogenesis afflicted area, but also serves to reduce deleterious side effects that may be associated with the therapeutic moiety.

[0189] In another preferred embodiment, the angiogenesis protein against which the antibodies are raised is an intracellular protein. In this case, the antibody may be conjugated to a protein which facilitates entry into the cell. In one case, the antibody enters the cell by endocytosis. In another embodiment, a nucleic acid encoding the antibody is administered to the individual or cell. Moreover, wherein the angiogenesis protein can be targeted within a cell, i.e., the nucleus, an antibody thereto contains a signal for that target localization, i.e., a nuclear localization signal.

[0190] The angiogenesis antibodies of the invention specifically bind to angiogenesis proteins. By “specifically bind” herein is meant that the antibodies bind to the protein with a K_{d} of at least about 0.1 mM, more usually at least about 1 μ M, preferably at least about 0.1 μM or better, and most preferably, 0.01 μM or better. Selectivity of binding is also important.

[0191] In a preferred embodiment, the angiogenesis protein is purified or isolated after expression. Angiogenesis proteins may be isolated or purified in a variety of ways known to those skilled in the art depending on what other components are present in the sample. Standard purification methods include electrophoretic, molecular, immunological and chromatographic techniques, including ion exchange, hydrophobic, affinity, and reverse-phase HPLC chromatography, and chromatofocusing. For example, the angiogenesis protein may be purified using a standard anti-angiogenesis protein antibody column. Ultrafiltration and diafiltration techniques, in conjunction with protein concentration, are also useful. For general guidance in suitable purification techniques, see Scopes, R., Protein Purification, Springer-Verlag, N.Y. (1982). The degree of purification necessary will vary depending on the use of the angiogenesis protein. In some instances no purification will be necessary.

[0192] Once expressed and purified if necessary, the angiogenesis proteins and nucleic acids are useful in a number of applications. They may be used as immunoselection reagents, as vaccine reagents, as screening agents, etc.

[0193] Detection of Angiogenesis Sequence for Diagnostic and Therapeutic Applications

[0194] In one aspect, the RNA expression levels of genes are determined for different cellular states in the angiogenesis phenotype. Expression levels of genes in normal tissue (i.e., not undergoing angiogenesis) and in angiogenesis tissue (and in some cases, for varying severities of angiogenesis that relate to prognosis, as outlined below) are evaluated to provide expression profiles. An expression profile of a particular cell state or point of development is essentially a “fingerprint” of the state. While two states may have any particular gene similarly expressed, the evaluation of a number of genes simultaneously allows the generation of a gene expression profile that is reflective of the state of the cell. By comparing expression profiles of cells in different states, information regarding which genes are important (including both up- and down-regulation of genes) in each of these states is obtained. Then, diagnosis may be performed or confirmed to determine whether a tissue sample has the gene expression profile of normal or angiogenesic tissue. This will provide for molecular diagnosis of related conditions.

[0195] “Differential expression,” or grammatical equivalents as used herein, refers to qualitative or quantitative differences in the temporal and/or cellular gene expression patterns within and among cells and tissue. Thus, a differentially expressed gene can qualitatively have its expression altered, including an activation or inactivation, in, e.g., normal versus angiogenic tissue. Genes may be turned on or turned off in a particular state, relative to another state thus permitting comparison of two or more statese. A qualitatively regulated gene will exhibit an expression pattern within a state or cell type which is detectable by standard techniques. Some genes will be expressed in one state or cell type, but not in both. Alternatively, the difference in expression may be quantitative, e.g., in that expression is increased or decreased; i.e., gene expression is either upregulated, resulting in an increased amount of transcript, or downregulated, resulting in a decreased amount of transcript. The degree to which expression differs need only be large enough to quantify via standard characterization techniques as outlined below, such as by use of Affymetrix GeneChip™ expression arrays, Lockhart, Nature Biotechnology, 14:1675-1680 (1996), hereby expressly incorporated by reference. Other techniques include, but are not limited to, quantitative reverse transcriptase PCR, Northern analysis and RNase protection. As outlined above, preferably the change in expression (i.e., upregulation or downregulation) is at least about 50%, more preferably at least about 100%, more preferably at least about 150%, more preferably at least about 200%, with from 300 to at least 1000% being especially preferred.

[0196] Evaluation may be at the gene transcript, or the protein level. The amount of gene expression may be monitored using nucleic acid probes to the DNA or RNA equivalent of the gene transcript, and the quantification of gene expression levels, or, alternatively, the final gene product itself (protein) can be monitored, e.g., with antibodies to the angiogenesis protein and standard immunoassays (ELISAs, etc.) or other techniques, including mass spectroscopy assays, 2D gel electrophoresis assays, etc. Proteins corresponding to angiogenesis genes, i.e., those identified as being important in an angiogenesis phenotype, can be evaluated in an angiogenesis diagnostic test.

[0197] In a preferred embodiment, gene expression monitoring is performed simultaneously on a number of genes. Multiple protein expression monitoring can be performed as well. Similarly, these assays may be performed on an individual basis as well.

[0198] In this embodiment, the angiogenesis nucleic acid probes are attached to biochips as outlined herein for the detection and quantification of angiogenesis sequences in a particular cell. The assays are further described below in the example. PCR techniques can be used to provide greater sensitivity.

[0199] In a preferred embodiment nucleic acids encoding the angiogenesis protein are detected. Although DNA or RNA encoding the angiogenesis protein may be detected, of particular interest are methods wherein an mRNA encoding an angiogenesis protein is detected. Probes to detect mRNA can be a nucleotide/deoxynucleotide probe that is complementary to and hybridizes with the mRNA and includes, but is not limited to, oligonucleotides, cDNA or RNA. Probes also should contain a detectable label, as defined herein. In one method the mRNA is detected after immobilizing the nucleic acid to be examined on a solid support such as nylon membranes and hybridizing the probe with the sample. Following washing to remove the non-specifically bound probe, the label is detected. In another method detection of the mRNA is performed in situ. In this method permeabilized cells or tissue samples are contacted with a detectably labeled nucleic acid probe for sufficient time to allow the probe to hybridize with the target mRNA. Following washing to remove the non-specifically bound probe, the label is detected. For example a digoxygenin labeled riboprobe (RNA probe) that is complementary to the mRNA encoding an angiogenesis protein is detected by binding the digoxygenin with an anti-digoxygenin secondary antibody and developed with nitro blue tetrazolium and 5-bromo-4-chloro-3-indoyl phosphate.

[0200] In a preferred embodiment, various proteins from the three classes of proteins as described herein (secreted, transmembrane or intracellular proteins) are used in diagnostic assays. The angiogenesis proteins, antibodies, nucleic acids, modified proteins and cells containing angiogenesis sequences are used in diagnostic assays. This can be performed on an individual gene or corresponding polypeptide level. In a preferred embodiment, the expression profiles are used, preferably in conjunction with high throughput screening techniques to allow monitoring for expression profile genes and/or corresponding polypeptides.

[0201] As described and defined herein, angiogenesis proteins, including intracellular, transmembrane or secreted proteins, find use as markers of angiogenesis. Detection of these proteins in putative angiogenesis tissue allows for detection or diagnosis of angiogenesis. In one embodiment, antibodies are used to detect angiogenesis proteins. A preferred method separates proteins from a sample by electrophoresis on a gel (typically a denaturing and reducing protein gel, but may be another type of gel, including isoelectric focusing gels and the like). Following separation of proteins, the angiogenesis protein is detected, e.g., by immunoblotting with antibodies raised against the angiogenesis protein. Methods of immunoblotting are well known to those of ordinary skill in the art.

[0202] In another preferred method, antibodies to the angiogenesis protein find use in in situ imaging techniques, e.g., in histology (e.g., Methods in Cell Biology: Antibodies in Cell Biology, volume 37 (Asai, ed. 1993)). In this method cells are contacted with from one to many antibodies to the angiogenesis protein(s). Following washing to remove non-specific antibody binding, the presence of the antibody or antibodies is detected. In one embodiment the antibody is detected by incubating with a secondary antibody that contains a detectable label. In another method the primary antibody to the angiogenesis protein(s) contains a detectable label, for example an enzyme marker that can act on a substrate. In another preferred embodiment each one of multiple primary antibodies contains a distinct and detectable label. This method finds particular use in simultaneous screening for a plurality of angiogenesis proteins. As will be appreciated by one of ordinary skill in the art, many other histological imaging techniques are alsoprovided by the invention.

[0203] In a preferred embodiment the label is detected in a fluorometer which has the ability to detect and distinguish emissions of different wavelengths. In addition, a fluorescence activated cell sorter (FACS) can be used in the method.

[0204] In another preferred embodiment, antibodies find use in diagnosing angiogenesis from blood samples. As previously described, certain angiogenesis proteins are secreted/circulating molecules. Blood samples, therefore, are useful as samples to be probed or tested for the presence of secreted angiogenesis proteins. Antibodies can be used to detect an angiogenesis protein by previously described immunoassay techniques including ELISA, immunoblotting (Western blotting), immunoprecipitation, BIACORE technology and the like. Conversely, the presence of antibodies may indicate an immune response against an endogenous angiogenesis protein.

[0205] In a preferred embodiment, in situ hybridization of labeled angiogenesis nucleic acid probes to tissue arrays is done. For example, arrays of tissue samples, including angiogenesis tissue and/or normal tissue, are made. In situ hybridization (see, e.g., Ausubel, supra) is then performed. When comparing the fingerprints between an individual and a standard, the skilled artisan can make a diagnosis, a prognosis, or a prediction based on the findings. It is further understood that the genes which indicate the diagnosis may differ from those which indicate the prognosis and molecular profiling of the condition of the cells may lead to distinctions between responsive or refractory conditions or may be predictive of outcomes.

[0206] In a preferred embodiment, the angiogenesis proteins, antibodies, nucleic acids, modified proteins and cells containing angiogenesis sequences are used in prognosis assays. As above, gene expression profiles can be generated that correlate to angiogenesis severity, in terms of long term prognosis. Again, this may be done on either a protein or gene level, with the use of genes being preferred. As above, angiogenesis probes may be attached to biochips for the detection and quantification of angiogenesis sequences in a tissue or patient. The assays proceed as outlined above for diagnosis. PCR method may provide more sensitive and accurate quantification.

[0207] In a preferred embodiment members of the three classes of proteins as described herein are used in drug screening assays. The angiogenesis proteins, antibodies, nucleic acids, modified proteins and cells containing angiogenesis sequences are used in drug screening assays or by evaluating the effect of drug candidates on a “gene expression profile” or expression profile of polypeptides. In a preferred embodiment, the expression profiles are used, preferably in conjunction with high throughput screening techniques to allow monitoring for expression profile genes after treatment with a candidate agent (e.g., Zlokarnik, et al., Science 279, 84-8 (1998); Heid, Genome Res 6:986-94, 1996).

[0208] In a preferred embodiment, the angiogenesis proteins, antibodies, nucleic acids, modified proteins and cells containing the native or modified angiogenesis proteins are used in screening assays. That is, the present invention provides novel methods for screening for compositions which modulate the angiogenesis phenotype or an identified physiological function of an angiogenesis protein. As above, this can be done on an individual gene level or by evaluating the effect of drug candidates on a “gene expression profile”. In a preferred embodiment, the expression profiles are used, preferably in conjunction with high throughput screening techniques to allow monitoring for expression profile genes after treatment with a candidate agent, see Zlokarnik, supra.

[0209] Having identified the differentially expressed genes herein, a variety of assays may be executed. In a preferred embodiment, assays may be run on an individual gene or protein level. That is, having identified a particular gene as up regulated in angiogenesis, test compounds can be screened for the ability to modulate gene expression or for binding to the angiogenic protein. “Modulation” thus includes both an increase and a decrease in gene expression. The preferred amount of modulation will depend on the original change of the gene expression in normal versus tissue undergoing angiogenesis, with changes of at least 10%, preferably 50%, more preferably 100-300%, and in some embodiments 300-1000% or greater. Thus, if a gene exhibits a 4-fold increase in angiogenic tissue compared to normal tissue, a decrease of about four-fold is often desired; similarly, a 10-fold decrease in angiogenic tissue compared to normal tissue often provides a target value of a 10-fold increase in expression to be induced by the test compound.

[0210] The amount of gene expression may be monitored using nucleic acid probes and the quantification of gene expression levels, or, alternatively, the gene product itself can be monitored, e.g., through the use of antibodies to the angiogenesis protein and standard immunoassays. Proteomics and separation techniques may also allow quantification of expression.

[0211] In a preferred embodiment, gene expression or protein monitoring of a number of entitites, i.e., an expression profile, is monitored simultaneously. Such profiles will typically invove a plurality of those entitites described herein.

[0212] In this embodiment, the angiogenesis nucleic acid probes are attached to biochips as outlined herein for the detection and quantification of angiogenesis sequences in a particular cell. Alternatively, PCR may be used. Thus, a series, e.g., of microtiter plate, may be used with dispensed primers in desired wells. A PCR reaction can then be performed and analyzed for each well.

[0213] Modulators of Angiogenesis

[0214] Expression monitoring can be performed to identify compounds that modify the expression of one or more angiogenesis-associated sequences, e.g., a polynucleotide sequence set out in Table 1. Generally, in a preferred embodiment, a test modulator is added to the cells prior to analysis. Moreover, screens are also provided to identify agents that modulate angiogenesis, modulate angiogenesis proteins, bind to an angiogenesis protein, or interfere with the binding of an angiogenesis protein and an antibody or other binding partner.

[0215] The term “test compound” or “drug candidate” or “modulator” or grammatical equivalents as used herein describes any molecule, e.g., protein, oligopeptide, small organic molecule, polysaccharide, polynucleotide, etc., to be tested for the capacity to directly or indirectly alter the angiogenesis phenotype or the expression of an angiogenesis sequence, e.g., a nucleic acid or protein sequence. In preferred embodiments, modulators alter expression profiles, or expression profile nucleic acids or proteins provided herein. In one embodiment, the modulator suppresses an angiogenesis phenotype, for example to a normal tissue fingerprint. In another embodiment, a modulator induced an angiogenesis phenotype. Generally, a plurality of assay mixtures are run in parallel with different agent concentrations to obtain a differential response to the various concentrations. Typically, one of these concentrations serves as a negative control, i.e., at zero concentration or below the level of detection.

[0216] In one aspect, a modulator will neutralize the effect of an angiogenesis protein. By “neutralize” is meant that activity of a protein is inhibited or blocked and thereby has substantially no effect on a cell.

[0217] In certain embodiments, combinatorial libraries of potential modulators will be screened for an ability to bind to an angiogenesis polypeptide or to modulate activity. Conventionally, new chemical entities with useful properties are generated by identifying a chemical compound (called a “lead compound”) with some desirable property or activity, e.g., inhibiting activity, creating variants of the lead compound, and evaluating the property and activity of those variant compounds. Often, high throughput screening (HTS) method are employed for such an analysis.

[0218] In one preferred embodiment, high throughput screening methods involve providing a library containing a large number of potential therapeutic compounds (candidate compounds). Such “combinatorial chemical libraries” are then screened in one or more assays to identify those library members (particular chemical species or subclasses) that display a desired characteristic activity. The compounds thus identified can serve as conventional “lead compounds” or can themselves be used as potential or actual therapeutics.

[0219] A combinatorial chemical library is a collection of diverse chemical compounds generated by either chemical synthesis or biological synthesis by combining a number of chemical “building blocks” such as reagents. For example, a linear combinatorial chemical library, such as a polypeptide (e.g., mutein) library, is formed by combining a set of chemical building blocks called amino acids in every possible way for a given compound length (i.e., the number of amino acids in a polypeptide compound). Millions of chemical compounds can be synthesized through such combinatorial mixing of chemical building blocks (Gallop et al. (1994) J. Med. Chem. 37(9): 1233-1251).

[0220] Preparation and screening of combinatorial chemical libraries is well known to those of skill in the art. Such combinatorial chemical libraries include, but are not limited to, peptide libraries (see, e.g., U.S. Pat. No. 5,010,175, Furka (1991) Int. J. Pept. Prot. Res., 37: 487-493, Houghton et al. (1991) Nature, 354: 84-88), peptoids (PCT Publication No WO 91/19735, 26 Dec. 1991), encoded peptides (PCT Publication WO 93/20242, Oct. 14, 1993), random bio-oligomers (PCT Publication WO 92/00091, Jan. 9, 1992), benzodiazepines (U.S. Pat. No. 5,288,514), diversomers such as hydantoins, benzodiazepines and dipeptides (Hobbs et al., (1993) Proc. Nat. Acad. Sci. USA 90: 6909-6913), vinylogous polypeptides (Hagihara et al. (1992) J. Amer. Chem. Soc. 114: 6568), nonpeptidal peptidomimetics with a Beta-D-Glucose scaffolding (Hirschmann et al., (1992) J. Amer. Chem. Soc. 114: 9217-9218), analogous organic syntheses of small compound libraries (Chen et al. (1994) J. Amer. Chem. Soc. 116: 2661), oligocarbamates (Cho, et al., (1993) Science 261:1303), and/or peptidyl phosphonates (Campbell et al., (1994) J. Org. Chem. 59: 658). See, generally, Gordon et al., (1994) J. Med. Chem. 37:1385, nucleic acid libraries (see, e.g., Strategene, Corp.), peptide nucleic acid libraries (see, e.g., U.S. Pat. No. 5,539,083), antibody libraries (see, e.g. Vaughn et al. (1996) Nature Biotechnology, 14(3): 309-314), and PCT/US96/10287), carbohydrate libraries (see, e.g., Liang et al., (1996) Science, 274: 1520-1522, and U.S. Pat. No. 5,593,853), and small organic molecule libraries (see, e.g., benzodiazepines, Baum (1993) C&EN, January 18, page 25; isoprenoids, U.S. Pat. No. 5,569,588; thiazolidinones and metathiazanones, U.S. Pat. No. 5,549,974; pyrrolidines, U.S. Pat. Nos. 5,525,735 and 5,519,134; morpholino compounds, U.S. Pat. No. 5,506,337; benzodiazepines, U.S. Pat. No. 5,288,514; and the like).

[0221] Devices for the preparation of combinatorial libraries are commercially available (see, e.g., 357 MPS, 390 MPS, Advanced Chem Tech, Louisville Ky., Symphony, Rainin, Woburn, Mass., 433A Applied Biosystems, Foster City, Calif., 9050 Plus, Millipore, Bedford, Mass.).

[0222] A number of well known robotic systems have also been developed for solution phase chemistries. These systems include automated workstations like the automated synthesis apparatus developed by Takeda Chemical Industries, LTD. (Osaka, Japan) and many robotic systems utilizing robotic arms (Zymate II, Zymark Corporation, Hopkinton, Mass.; Orca, Hewlett-Packard, Palo Alto, Calif.), which mimic the manual synthetic operations performed by a chemist. Any of the above devices are suitable for use with the present invention. The nature and implementation of modifications to these devices (if any) so that they can operate as discussed herein will be apparent to persons skilled in the relevant art. In addition, numerous combinatorial libraries are themselves commercially available (see, e.g., ComGenex, Princeton, N.J., Asinex, Moscow, Ru, Tripos, Inc., St. Louis, Mo., ChemStar, Ltd, Moscow, RU, 3D Pharmaceuticals, Exton, Pa., Mattek Biosciences, Columbia, Md., etc.).

[0223] The assays to identify modulators are amenable to high throughput screening. Preferred assays thus detect enhancement or inhibition of angiogenesis gene transcription, inhibition or enhancement of polypeptide expression, and inhibition or enhancement of polypeptide activity.

[0224] High throughput assays for the presence, absence, quantification, or other properties of particular nucleic acids or protein products are well known to those of skill in the art. Similarly, binding assays and reporter gene assays are similarly well known. Thus, for example, U.S. Pat. No. 5,559,410 discloses high throughput screening methods for proteins, U.S. Pat. No. 5,585,639 discloses high throughput screening methods for nucleic acid binding (i.e., in arrays), while U.S. Pat. Nos. 5,576,220 and 5,541,061 disclose high throughput methods of screening for ligand/antibody binding.

[0225] In addition, high throughput screening systems are commercially available (see, e.g., Zymark Corp., Hopkinton, Mass.; Air Technical Industries, Mentor, Ohio; Beckman Instruments, Inc. Fullerton, Calif.; Precision Systems, Inc., Natick, Mass., etc.). These systems typically automate entire procedures, including all sample and reagent pipetting, liquid dispensing, timed incubations, and final readings of the microplate in detector(s) appropriate for the assay. These configurable systems provide high throughput and rapid start up as well as a high degree of flexibility and customization. The manufacturers of such systems provide detailed protocols for various high throughput systems. Thus, for example, Zymark Corp. provides technical bulletins describing screening systems for detecting the modulation of gene transcription, ligand binding, and the like.

[0226] In one embodiment, modulators are proteins, often naturally occurring proteins or fragments of naturally occurring proteins. Thus, e.g., cellular extracts containing proteins, or random or directed digests of proteinaceous cellular extracts, may be used. In this way libraries of proteins may be made for screening in the methods of the invention. Particularly preferred in this embodiment are libraries of bacterial, fungal, viral, and mammalian proteins, with the latter being preferred, and human proteins being especially preferred. Paticularly useful test compound will be directed to the class of proteins to which the target belongs, e.g., substrates for enzymes or ligands and receptors.

[0227] In a preferred embodiment, modulators are peptides of from about 5 to about 30 amino acids, with from about 5 to about 20 amino acids being preferred, and from about 7 to about 15 being particularly preferred. The peptides may be digests of naturally occurring proteins as is outlined above, random peptides, or “biased” random peptides. By “randomized” or grammatical equivalents herein is meant that each nucleic acid and peptide consists of essentially random nucleotides and amino acids, respectively. Since generally these random peptides (or nucleic acids, discussed below) are chemically synthesized, they may incorporate any nucleotide or amino acid at any position. The synthetic process can be designed to generate randomized proteins or nucleic acids, to allow the formation of all or most of the possible combinations over the length of the sequence, thus forming a library of randomized candidate bioactive proteinaceous agents.

[0228] In one embodiment, the library is fully randomized, with no sequence preferences or constants at any position. In a preferred embodiment, the library is biased. That is, some positions within the sequence are either held constant, or are selected from a limited number of possibilities. For example, in a preferred embodiment, the nucleotides or amino acid residues are randomized within a defined class, for example, of hydrophobic amino acids, hydrophilic residues, sterically biased (either small or large) residues, towards the creation of nucleic acid binding domains, the creation of cysteines, for cross-linking, prolines for SH-3 domains, serines, threonines, tyrosines or histidines for phosphorylation sites, etc., or to purines, etc.

[0229] Modulators of angiogenesis can also be nucleic acids, as defined above.

[0230] As described above generally for proteins, nucleic acid modulating agents may be naturally occurring nucleic acids, random nucleic acids, or “biased” random nucleic acids. For example, digests of procaryotic or eucaryotic genomes may be used as is outlined above for proteins.

[0231] In a preferred embodiment, the candidate compounds are organic chemical moieties, a wide variety of which are available in the literature.

[0232] After the candidate agent has been added and the cells allowed to incubate for some period of time, the sample containing a target sequence to be analyzed is added to the biochip. If required, the target sequence is prepared using known techniques. For example, the sample may be treated to lyse the cells, using known lysis buffers, electroporation, etc., with purification and/or amplification such as PCR performed as appropriate. For example, an in vitro transcription with labels covalently attached to the nucleotides is performed. Generally, the nucleic acids are labeled with biotin-FITC or PE, or with cy3 or cy5.

[0233] In a preferred embodiment, the target sequence is labeled with, for example, a fluorescent, a chemiluminescent, a chemical, or a radioactive signal, to provide a means of detecting the target sequence's specific binding to a probe. The label also can be an enzyme, such as, alkaline phosphatase or horseradish peroxidase, which when provided with an appropriate substrate produces a product that can be detected. Alternatively, the label can be a labeled compound or small molecule, such as an enzyme inhibitor, that binds but is not catalyzed or altered by the enzyme. The label also can be a moiety or compound, such as, an epitope tag or biotin which specifically binds to streptavidin. For the example of biotin, the streptavidin is labeled as described above, thereby, providing a detectable signal for the bound target sequence. Unbound labeled streptavidin is typically removed prior to analysis.

[0234] As will be appreciated by those in the art, these assays can be direct hybridization assays or can comprise “sandwich assays”, which include the use of multiple probes, as is generally outlined in U.S. Pat. Nos. 5,681,702, 5,597,909, 5,545,730, 5,594,117, 5,591,584, 5,571,670, 5,580,731, 5,571,670, 5,591,584, 5,624,802, 5,635,352, 5,594,118, 5,359,100, 5,124,246 and 5,681,697, all of which are hereby incorporated by reference. In this embodiment, in general, the target nucleic acid is prepared as outlined above, and then added to the biochip comprising a plurality of nucleic acid probes, under conditions that allow the formation of a hybridization complex.

[0235] A variety of hybridization conditions may be used in the present invention, including high, moderate and low stringency conditions as outlined above. The assays are generally run under stringency conditions which allows formation of the label probe hybridization complex only in the presence of target. Stringency can be controlled by altering a step parameter that is a thermodynamic variable, including, but not limited to, temperature, formamide concentration, salt concentration, chaotropic salt concentration pH, organic solvent concentration, etc.

[0236] These parameters may also be used to control non-specific binding, as is generally outlined in U.S. Pat. No. 5,681,697. Thus it may be desirable to perform certain steps at higher stringency conditions to reduce non-specific binding.

[0237] The reactions outlined herein may be accomplished in a variety of ways. Components of the reaction may be added simultaneously, or sequentially, in different orders, with preferred embodiments outlined below. In addition, the reaction may include a variety of other reagents. These include salts, buffers, neutral proteins, e.g. albumin, detergents, etc. which may be used to facilitate optimal hybridization and detection, and/or reduce non-specific or background interactions. Reagents that otherwise improve the efficiency of the assay, such as protease inhibitors, nuclease inhibitors, anti-microbial agents, etc., may also be used as appropriate, depending on the sample preparation methods and purity of the target.

[0238] The assay data are analyzed to determine the expression levels, and changes in expression levels as between states, of individual genes, forming a gene expression profile.

[0239] Screens are performed to identify modulators of the angiogenesis phenotype. In one embodiment, screening is performed to identify modulators that can induce or suppress a particular expression profile, thus preferably generating the associated phenotype. In another embodiment, e.g., for diagnostic applications, having identified differentially expressed genes important in a particular state, screens can be performed to identify modulators that alter expression of individual genes. In an another embodiment, screening is performed to identify modulators that alter a biological function of the expression product of a differentially expressed gene. Again, having identified the importance of a gene in a particular state, screens are performed to identify agents that bind and/or modulate the biological activity of the gene product.

[0240] In addition screens can be done for genes that are induced in response to a candidate agent. After identifying a modulator based upon its ability to suppress an angiogenesis expression pattern leading to a normal expression pattern, or to modulate a single angiogenesis gene expression profile so as to mimic the expression of the gene from normal tissue, a screen as described above can be performed to identify genes that are specifically modulated in response to the agent. Comparing expression profiles between normal tissue and agent treated angiogenesis tissue reveals genes that are not expressed in normal tissue or angiogenesis tissue, but are expressed in agent treated tissue. These agent-specific sequences can be identified and used by methods described herein for angiogenesis genes or proteins. In particular these sequences and the proteins they encode find use in marking or identifying agent treated cells. In addition, antibodies can be raised against the agent induced proteins and used to target novel therapeutics to the treated angiogenesis tissue sample.

[0241] Thus, in one embodiment, a test compound is administered to a population of angiogenic cells, that have an associated angiogenesis expression profile. By “administration” or “contacting” herein is meant that the candidate agent is added to the cells in such a manner as to allow the agent to act upon the cell, whether by uptake and intracellular action, or by action at the cell surface. In some embodiments, nucleic acid encoding a proteinaceous candidate agent (i.e., a peptide) may be put into a viral construct such as an adenoviral or retroviral construct, and added to the cell, such that expression of the peptide agent is accomplished, e.g., PCT US97/01019. Regulatable gene therapy systems can also be used.

[0242] Once the test compound has been administered to the cells, the cells can be washed if desired and are allowed to incubate under preferably physiological conditions for some period of time. The cells are then harvested and a new gene expression profile is generated, as outlined herein.

[0243] Thus, for example, angiogenesis tissue may be screened for agents that modulate, e.g., induce or suppress the angiogenesis phenotype. A change in at least one gene, preferably many, of the expression profile indicates that the agent has an effect on angiogenesis activity. By defining such a signature for the angiogenesis phenotype, screens for new drugs that alter the phenotype can be devised. With this approach, the drug target need not be known and need not be represented in the original expression screening platform, nor does the level of transcript for the target protein need to change.

[0244] Measure of angiogenesis polypeptide activity, or of angiogenesis or the angiogenic phenotype can be performed using a variety of assays. For example, the effects of the test compounds upon the function of the anagiogenesis polypeptides can be measured by examining parameters described above. A suitable physiological change that affects activity can be used to assess the influence of a test compound on the polypeptides of this invention. When the functional consequences are determined using intact cells or animals, one can also measure a variety of effects such as, in the case of angiogenesis associated with tumors, tumor growth, neovascularization, hormone release, transcriptional changes to both known and uncharacterized genetic markers (e.g., northern blots), changes in cell metabolism such as cell growth or pH changes, and changes in intracellular second messengers such as cGMP. In the assays of the invention, mammalian angiogenesis polypeptide is typically used, e.g., mouse, preferably human.

[0245] A variety of angiogenesis assays are known to those of skill in the art. Various models have been employed to evaluate angiogenesis (e.g., Croix et al., Science 289:1197-1202, 2000 and Kahn et al., Amer. J. Pathol. 156:1887-1900). Assessement of angiogenesis in the presence of a potential modulator of angiogenesis can be performed using cell-cultre-based angiogenesis assays, e.g., endothelial cell tube formation assays, as well as other bioassays such as the chick CAM assay, the mouse corneal assay, and assays measuring the effect of administering potential modulators on implanted tumors. The chick CAM assay is described by O'Reilly, et al. Cell 79: 315-328, 1994. Briefly, 3 day old chicken embryos with intact yolks are separated from the egg and placed in a petri dish. After 3 days of incubation, a methylcellulose disc containing the protein to be tested is applied to the CAM of individual embryos. After about 48 hours of incubation, the embryos and CAMs are observed to determine whether endothelial growth has been inhibited. The mouse corneal assay involves implanting a growth factor-containing pellet, along with another pellet containing the suspected endothelial growth inhibitor, in the cornea of a mouse and observing the pattern of capillaries that are elaborated in the cornea. Angiogenesis can also be measured by determining the extent of neovascularization of a tumor. For example, carcinoma cells can be subcutaneously inoculated into athymic nude mice and tumor growth then monitored. The cancer cells are treated with an angiogenesis inhibitor, such as an antibody, or other compound that is exogenously administered, or can be transfected prior to inoculation with a polynucleotide inhibitor of angiogenesis. Immunoassays using endothelial cell-specific antibodies are typically used to stain for vascularization of tumor and the number of vessels in the tumor.

[0246] Assays to identify compounds with modulating activity can be performed in vitro. For example, an angiogenesis polypeptide is first contacted with a potential modulator and incubated for a suitable amount of time, e.g., from 0.5 to 48 hours. In one embodiment, the angiogenesis polypeptide levels are determined in vitro by measuring the level of protein or mRNA. The level of protein is measured using immunoassays such as western blotting, ELISA and the like with an antibody that selectively binds to the angiogenesis polypeptide or a fragment thereof. For measurement of mRNA, amplification, e.g., using PCR, LCR, or hybridization assays, e.g., northern hybridization, RNAse protection, dot blotting, are preferred. The level of protein or mRNA is detected using directly or indirectly labeled detection agents, e.g., fluorescently or radioactively labeled nucleic acids, radioactively or enzymatically labeled antibodies, and the like, as described herein.

[0247] Alternatively, a reporter gene system can be devised using the angiogenesis protein promoter operably linked to a reporter gene such as luciferase, green fluorescent protein, CAT, or β-gal. The reporter construct is typically transfected into a cell. After treatment with a potential modulator, the amount of reporter gene transcription, translation, or activity is measured according to standard techniques known to those of skill in the art.

[0248] In a preferred embodiment, as outlined above, screens may be done on individual genes and gene products (proteins). That is, having identified a particular differentially expressed gene as important in a particular state, screening of modulators of the expression of the gene or the gene product itself can be done. The gene products of differentially expressed genes are sometimes referred to herein as “angiogenesis proteins”. In preferred embodiments the angiogenesis protein comprises a sequence shown in Table 2. The angiogenesis protein may be a fragment, or alternatively, be the full length protein to a fragment shown herein.

[0249] Preferably, the angiogenesis protein is a fragment of approximately 14 to 24 amino acids long. More preferably the fragment is a soluble fragment. In one embodiment an angiogenesis protein is conjugated to an immunogenic agent or BSA.

[0250] In one embodiment, screening for modulators of expression of specific genes is performed. Typically, the expression of only one or a few genes are evaluated. In another embodiment, screens are designed to first find compounds that bind to differentially expressed proteins. These compounds are then evaluated for the ability to modulate differentially expressed activity. Moreover, once initial candidate compounds are identified, variants can be further screened to better evaluate strucutre activity relationships.

[0251] In a preferred embodiment, binding assays are done. In general, purified or isolated gene product is used; that is, the gene products of one or more differentially expressed nucleic acids are made. For example, antibodies are generated to the protein gene products, and standard immunoassays are run to determine the amount of protein present. Alternatively, cells comprising the angiogenesis proteins can be used in the assays.

[0252] Thus, in a preferred embodiment, the methods comprise combining an angiogenesis protein and a candidate compound, and determining the binding of the compound to the angiogenesis protein. Preferred embodiments utilize the human angiogenesis protein, although other mammalian proteins may also be used, for example for the development of animal models of human disease. In some embodiments, as outlined herein, variant or derivative angiogenesis proteins may be used.

[0253] Generally, in a preferred embodiment of the methods herein, the angiogenesis protein or the candidate agent is non-diffusably bound to an insoluble support having isolated sample receiving areas (e.g. a microtiter plate, an array, etc.). The insoluble supports may be made of any composition to which the compositions can be bound, is readily separated from soluble material, and is otherwise compatible with the overall method of screening. The surface of such supports may be solid or porous and of any convenient shape. Examples of suitable insoluble supports include microtiter plates, arrays, membranes and beads. These are typically made of glass, plastic (e.g., polystyrene), polysaccharides, nylon or nitrocellulose, teflon™, etc. Microtiter plates and arrays are especially convenient because a large number of assays can be carried out simultaneously, using small amounts of reagents and samples. The particular manner of binding of the composition is not crucial so long as it is compatible with the reagents and overall methods of the invention, maintains the activity of the composition and is nondiffusable. Preferred methods of binding include the use of antibodies (which do not sterically block either the ligand binding site or activation sequence when the protein is bound to the support), direct binding to “sticky” or ionic supports, chemical crosslinking, the synthesis of the protein or agent on the surface, etc. Following binding of the protein or agent, excess unbound material is removed by washing. The sample receiving areas may then be blocked through incubation with bovine serum albumin (BSA), casein or other innocuous protein or other moiety.

[0254] In a preferred embodiment, the angiogenesis protein is bound to the support, and a test compound is added to the assay. Alternatively, the candidate agent is bound to the support and the angiogenesis protein is added. Novel binding agents include specific antibodies, non-natural binding agents identified in screens of chemical libraries, peptide analogs, etc. Of particular interest are screening assays for agents that have a low toxicity for human cells. A wide variety of assays may be used for this purpose, including labeled in vitro protein-protein binding assays, electrophoretic mobility shift assays, immunoassays for protein binding, functional assays (phosphorylation assays, etc.) and the like.

[0255] The determination of the binding of the test modulating compound to the angiogenesis protein may be done in a number of ways. In a preferred embodiment, the compound is labelled, and binding determined directly, e.g., by attaching all or a portion of the angiogenesis protein to a solid support, adding a labelled candidate agent (e.g. a fluorescent label), washing off excess reagent, and determining whether the label is present on the solid support. Various blocking and washing steps may be utilized as appropriate.

[0256] By “labeled” herein is meant that the compound is either directly or indirectly labeled with a label which provides a detectable signal, e.g. radioisotope, fluorescers, enzyme, antibodies, particles such as magnetic particles, chemiluminescers, or specific binding molecules, etc. Specific binding molecules include pairs, such as biotin and streptavidin, digoxin and antidigoxin, etc. For the specific binding members, the complementary member would normally be labeled with a molecule which provides for detection, in accordance with known procedures, as outlined above. The label can directly or indirectly provide a detectable signal.

[0257] In some embodiments, only one of the components is labeled, e.g., the proteins (or proteinaceous candidate compounds) can be labeled. Alternatively, more than one component can be labeled with different labels, e.g., 125 for the proteinsand a fluorophor for the compound. Proximity reagents, e.g., quenching or energy transfer reagents are also useful.

[0258] In one embodiment, the binding of the test compound is determined by competitive binding assay. The competitor is a binding moiety known to bind to the target molecule (i.e. an angiogenesis protein), such as an antibody, peptide, binding partner, ligand, etc. Under certain circumstances, there may be competitive binding between the compound and the binding moiety, with the binding moiety displacing the compound. In one embodiment, the test compound is labeled. Either the compound, or the competitor, or both, is added first to the protein for a time sufficient to allow binding, if present. Incubations may be performed at a temperature which facilitates optimal activity, typically between 4 and 40° C. Incubation periods are typically optimized, e.g., to facilitate rapid high throughput screening. Typically between 0.1 and 1 hour will be sufficient. Excess reagent is generally removed or washed away. The second component is then added, and the presence or absence of the labeled component is followed, to indicate binding.

[0259] In a preferred embodiment, the competitor is added first, followed by the test compound. Displacement of the competitor is an indication that the test compound is binding to the angiogenesis protein and thus is capable of binding to, and potentially modulating, the activity of the angiogenesis protein. In this embodiment, either component can be labeled. Thus, for example, if the competitor is labeled, the presence of label in the wash solution indicates displacement by the agent. Alternatively, if the test compound is labeled, the presence of the label on the support indicates displacement.

[0260] In an alternative embodiment, the test compound is added first, with incubation and washing, followed by the competitor. The absence of binding by the competitor may indicate that the test compound is bound to the angiogenesis protein with a higher affinity. Thus, if the test compound is labeled, the presence of the label on the support, coupled with a lack of competitor binding, may indicate that the test compound is capable of binding to the angiogenesis protein.

[0261] In a preferred embodiment, the methods comprise differential screening to identity agents that are capable of modulating the activitity of the angiogenesis proteins. In this embodiment, the methods comprise combining an angiogenesis protein and a competitor in a first sample. A second sample comprises a test compound, an angiogenesis protein, and a competitor. The binding of the competitor is determined for both samples, and a change, or difference in binding between the two samples indicates the presence of an agent capable of binding to the angiogenesis protein and potentially modulating its activity. That is, if the binding of the competitor is different in the second sample relative to the first sample, the agent is capable of binding to the angiogenesis protein.

[0262] Alternatively, differential screening is used to identify drug candidates that bind to the native angiogenesis protein, but cannot bind to modified angiogenesis proteins. The structure of the angiogenesis protein may be modeled, and used in rational drug design to synthesize agents that interact with that site. Drug candidates that affect the activity of an angiogenesis protein are also identified by screening drugs for the ability to either enhance or reduce the activity of the protein.

[0263] Positive controls and negative controls may be used in the assays. Preferably control and test samples are performed in at least triplicate to obtain statistically significant results. Incubation of all samples is for a time sufficient for the binding of the agent to the protein. Following incubation, samples are washed free of non-specifically bound material and the amount of bound, generally labeled agent determined. For example, where a radiolabel is employed, the samples may be counted in a scintillation counter to determine the amount of bound compound.

[0264] A variety of other reagents may be included in the screening assays. These include reagents like salts, neutral proteins, e.g. albumin, detergents, etc. which may be used to facilitate optimal protein-protein binding and/or reduce non-specific or background interactions. Also reagents that otherwise improve the efficiency of the assay, such as protease inhibitors, nuclease inhibitors, anti-microbial agents, etc., may be used. The mixture of components may be added in an order that provides for the requisite binding.

[0265] In a preferred embodiment, the invention provides methods for screening for a compound capable of modulating the activity of an angiogenesis protein. The methods comprise adding a test compound, as defined above, to a cell comprising angiogenesis proteins. Preferred cell types include almost any cell. The cells contain a recombinant nucleic acid that encodes an angiogenesis protein. In a preferred embodiment, a library of candidate agents are tested on a plurality of cells.

[0266] In one aspect, the assays are evaluated in the presence or absence or previous or subsequent exposure of physiological signals, for example hormones, antibodies, peptides, antigens, cytokines, growth factors, action potentials, pharmacological agents including chemotherapeutics, radiation, carcinogenics, or other cells (i.e. cell-cell contacts). In another example, the determinations are determined at different stages of the cell cycle process.

[0267] In this way, compounds that modulate angiogenesis agents are identified. Compounds with pharmacological activity are able to enhance or interfere with the activity of the angiogenesis protein. Once identified, similar structures are evaluated to identify critical structural feature of the compound.

[0268] In one embodiment, a method of inhibiting angiogenic cell division is provided. The method comprises administration of an angiogenesis inhibitor. In another embodiment, a method of inhibiting angiogenesis is provided. The method comprises administration of an angiogenesis inhibitor. In a further embodiment, methods of treating cells or individuals with angiogenesis are provided. The method comprises administration of an angiogenesis inhibitor.

[0269] In one embodiment, an angiogenesis inhibitor is an antibody as discussed above. In another embodiment, the angiogenesis inhibitor is an antisense molecule.

[0270] Polynucleotide Modulators of Angiogenesis

[0271] Antisense Polynucleotides

[0272] In certain embodiments, the activity of an angiogenesis-associated protein is downregulated, or entirely inhibited, by the use of antisense polynucleotide, i.e., a nucleic acid complementary to, and which can preferably hybridize specifically to, a coding mRNA nucleic acid sequence, e.g. in angiogenesis protein mRNA, or a subsequence thereof. Binding of the antisense polynucleotide to the mRNA reduces the translation and/or stability of the mRNA.

[0273] In the context of this invention, antisense polynucleotides can comprise naturally-occurring nucleotides, or synthetic species formed from naturally-occurring subunits or their close homologs. Antisense polynucleotides may also have altered sugar moieties or inter-sugar linkages. Exemplary among these are the phosphorothioate and other sulfur containing species which are known for use in the art. Analogs are comprehended by this invention so long as they function effectively to hybridize with the angiogenesis protein mRNA. See, e.g., Isis Pharmaceuticals, Carlsbad, CA; Sequitor, Inc., Natick, MA.

[0274] Such antisense polynucleotides can readily be synthesized using recombinant means, or can be synthesized in vitro. Equipment for such synthesis is sold by several vendors, including Applied Biosystems. The preparation of other oligonucleotides such as phosphorothioates and alkylated derivatives is also well known to those of skill in the art.

[0275] Antisense molecules as used herein include antisense or sense oligonucleotides. Sense oligonucleotides can, e.g., be employed to block trancription by binding to the anti-sense strand. The antisense and sense oligonucleotide comprise a single-stranded nucleic acid sequence (either RNA or DNA) capable of binding to target mRNA (sense) or DNA (antisense) sequences for angiogenesis molecules. A preferred antisense molecule is for an angiogenesis sequences in Table 1, or for a ligand or activator thereof. Antisense or sense oligonucleotides, according to the present invention, comprise a fragment generally at least about 14 nucleotides, preferably from about 14 to 30 nucleotides. The ability to derive an antisense or a sense oligonucleotide, based upon a cDNA sequence encoding a given protein is described in, for example, Stein and Cohen (Cancer Res. 48:2659, 1988) and van der Krol et al. (BioTechniques 6:958, 1988).

[0276] Ribozymes

[0277] In addition to antisense polynucleotides, ribozymes can be used to target and inhibit transcription of angiogenesis-associated nucleotide sequences. A ribozyme is an RNA molecule that catalytically cleaves other RNA molecules. Different kinds of ribozymes have been described, including group I ribozymes, hammerhead ribozymes, hairpin ribozymes, RNase P, and axhead ribozymes (see, e.g., Castanotto et al. (1994) Adv. in Pharmacology 25: 289-317 for a general review of the properties of different ribozymes).

[0278] The general features of hairpin ribozymes are described, e.g., in Hampel et al. (1990) Nucl. Acids Res. 18: 299-304; Hampel et al. (1990) European Patent Publication No. 0 360 257; U.S. Pat. No. 5,254,678. Methods of preparing are well known to those of skill in the art (see, e.g., Wong-Staal et al., WO 94/26877; Ojwang et al. (1993) Proc. Natl. Acad. Sci. USA 90: 6340-6344; Yamada et al. (1994) Human Gene Therapy 1: 39-45; Leavitt et al. (1995) Proc. Natl. Acad. Sci. USA 92: 699-703; Leavitt et al. (1994) Human Gene Therapy 5: 1151-120; and Yamada et al. (1994) Virology 205: 121-126).

[0279] Polynucleotide modulators of angiogenesis may be introduced into a cell containing the target nucleotide sequence by formation of a conjugate with a ligand binding molecule, as described in WO 91/04753. Suitable ligand binding molecules include, but are not limited to, cell surface receptors, growth factors, other cytokines, or other ligands that bind to cell surface receptors. Preferably, conjugation of the ligand binding molecule does not substantially interfere with the ability of the ligand binding molecule to bind to its corresponding molecule or receptor, or block entry of the sense or antisense oligonucleotide or its conjugated version into the cell. Alternatively, a polynucleotide modulator of angiogenesis may be introduced into a cell containing the target nucleic acid sequence, e.g., by formation of an polynucleotide-lipid complex, as described in WO 90/10448. It is understood that the use of aitisense molecules or knock out and knock in models may also be used in screening assays as discussed above, in addition to methods of treatment.

[0280] Thus, in one embodiment, methods of modulating angiogenesis in cells or organisms are provided. In one embodiment, the methods comprise administering to a cell an anti-angiogenesis antibody that reduces or eliminates the biological activity of an endogeneous angiogenesis protein. Alternatively, the methods comprise administering to a cell or organism a recombinant nucleic acid encoding an angiogenesis protein. This may be accomplished in any number of ways. In a preferred embodiment, for example when the angiogenesis sequence is down-regulated in angiogenesis, such state may be reversed by increasing the amount of angiogenesis gene product in the cell. This can be accomplished, e.g., by overexpressing the endogeneous angiogenesis gene or administering a gene encoding the angiogenesis sequence, using known gene-therapy techniques, for example. In a preferred embodiment, the gene therapy techniques include the incorporation of the exogenous gene using enhanced homologous recombination (EHR), for example as described in PCT/US93/03868, hereby incorporated by reference in its entireity. Alternatively, for example when the angiogenesis sequence is up-regulated in angiogenesis, the activity of the endogeneous angiogenesis gene is decreased, for example by the administration of a angiogenesis antisense nucleic acid.

[0281] In one embodiment, the angiogenesis proteins of the present invention may be used to generate polyclonal and monoclonal antibodies to angiogenesis proteins. Similarly, the angiogenesis proteins can be coupled, using standard technology, to affinity chromatography columns. These columns may then be used to purify angiogenesis antibodies useful for production, diagnostic, or therapeutic purposes. In a preferred embodiment, the antibodies are generated to epitopes unique to a angiogenesis protein; that is, the antibodies show little or no cross-reactivity to other proteins. The angiogenesis antibodies may be coupled to standard affinity chromatography columns and used to purify angiogenesis proteins. The antibodies may also be used as blocking polypeptides, as outlined above, since they will specifically bind to the angiogenesis protein.

[0282] Methods of Identifying Variant Angiogenesis-associated Sequences

[0283] Without being bound by theory, expression of various angiogenesis sequences is correlated with angiogenesis. Accordingly, disorders based on mutant or variant angiogenesis genes may be determined. In one embodiment, the invention provides methods for identifying cells containing variant angiogenesis genes, e.g., determining all or part of the sequence of at least one endogeneous angiogenesis genes in a cell. This may be accomplished using any number of sequencing techniques. In a preferred embodiment, the invention provides methods of identifying the angiogenesis genotype of an individual, e.g., determining all or part of the sequence of at least one angiogenesis gene of the individual. This is generally done in at least one tissue of the individual, and may include the evaluation of a number of tissues or different samples of the same tissue. The method may include comparing the sequence of the sequenced angiogenesis gene to a known angiogenesis gene, i.e., a wild-type gene.

[0284] The sequence of all or part of the angiogenesis gene can then be compared to the sequence of a known angiogenesis gene to determine if any differences exist. This can be done using any number of known homology programs, such as Bestfit, etc. In a preferred embodiment, the presence of a a difference in the sequence between the angiogenesis gene of the patient and the known angiogenesis gene correlates with a disease state or a propensity for a disease state, as outlined herein.

[0285] In a preferred embodiment, the angiogenesis genes are used as probes to determine the number of copies of the angiogenesis gene in the genome.

[0286] In another preferred embodiment, the angiogenesis genes are used as probes to determine the chromosomal localization of the angiogenesis genes. Information such as chromosomal localization finds use in providing a diagnosis or prognosis in particular when chromosomal abnormalities such as translocations, and the like are identified in the angiogenesis gene locus.

[0287] Administration of Pharmaceutical and Vaccine Compositions

[0288] In one embodiment, a therapeutically effective dose of an angiogenesis protein or modulator thereof, is administered to a patient. By “therapeutically effective dose” herein is meant a dose that produces effects for which it is administered. The exact dose will depend on the purpose of the treatment, and will be ascertainable by one skilled in the art using known techniques (e.g., Ansel et al., Pharmaceuitcal Dosage Forms and Drug Delivery, Lippincott, Williams & Wilkins Publishers, ISBN:0683305727; Lieberman (1992) Pharmaceutical Dosage Forms (vols. 1-3), Dekker, ISBN 0824770846, 082476918X, 0824712692, 0824716981; Lloyd (1999) The Art, Science and Technology of Pharmaceutical Compounding, Amer. Pharmacutical Assn, ISBN 0917330889; and Pickar (1999) Dosage Calculations, Delmar Pub, ISBN 0766805042). As is known in the art, adjustments for angiogenesis degradation, systemic versus localized delivery, and rate of new protease synthesis, as well as the age, body weight, general health, sex, diet, time of administration, drug interaction and the severity of the condition may be necessary, and will be ascertainable with routine experimentation by those skilled in the art.

[0289] A “patient” for the purposes of the present invention includes both humans and other animals, particularly mammals. Thus the methods are applicable to both human therapy and veterinary applications. In the preferred embodiment the patient is a mammal, preferably a primate, and in the most preferred embodiment the patient is human.

[0290] The administration of the angiogenesis proteins and modulators thereof of the present invention can be done in a variety of ways as discussed above, including, but not limited to, orally, subcutaneously, intravenously, intranasally, transdermally, intraperitoneally, intramuscularly, intrapulmonary, vaginally, rectally, or intraocularly. In some instances, for example, in the treatment of wounds and inflammation, the angiogenesis proteins and modulators may be directly applied as a solution or spray.

[0291] The pharmaceutical compositions of the present invention comprise an angiogenesis protein in a form suitable for administration to a patient. In the preferred embodiment, the pharmaceutical compositions are in a water soluble form, such as being present as pharmaceutically acceptable salts, which is meant to include both acid and base addition salts. “Pharmaceutically acceptable acid addition salt” refers to those salts that retain the biological effectiveness of the free bases and that are not biologically or otherwise undesirable, formed with inorganic acids such as hydrochloric acid, hydrobromic acid, sulfuric acid, nitric acid, phosphoric acid and the like, and organic acids such as acetic acid, propionic acid, glycolic acid, pyruvic acid, oxalic acid, maleic acid, malonic acid, succinic acid, fumaric acid, tartaric acid, citric acid, benzoic acid, cinnamic acid, mandelic acid, methanesulfonic acid, ethanesulfonic acid, p-toluenesulfonic acid, salicylic acid and the like. “Pharmaceutically acceptable base addition salts” include those derived from inorganic bases such as sodium, potassium, lithium, ammonium, calcium, magnesium, iron, zinc, copper, manganese, aluminum salts and the like. Particularly preferred are the ammonium, potassium, sodium, calcium, and magnesium salts. Salts derived from pharmaceutically acceptable organic non-toxic bases include salts of primary, secondary, and tertiary amines, substituted amines including naturally occurring substituted amines, cyclic amines and basic ion exchange resins, such as isopropylamine, trimethylamine, diethylamine, triethylamine, tripropylamine, and ethanolamine.

[0292] The pharmaceutical compositions may also include one or more of the following: carrier proteins such as serum albumin; buffers; fillers such as microcrystalline cellulose, lactose, corn and other starches; binding agents; sweeteners and other flavoring agents; coloring agents; and polyethylene glycol.

[0293] The pharmaceutical compositions can be administered in a variety of unit dosage forms depending upon the method of administration. For example, unit dosage forms suitable for oral administration include, but are not limited to, powder, tablets, pills, capsules and lozenges. It is recognized that angiogenesis protein modulators (e.g. antibodies, antisense constructs, ribozymes, small organic molecules, etc.) when administered orally, should be protected from digestion. This is typically accomplished either by complexing the molecule(s) with a composition to render it resistant to acidic and enzymatic hydrolysis, or by packaging the molecule(s) in an appropriately resistant carrier, such as a liposome or a protection barrier. Means of protecting agents from digestion are well known in the art.

[0294] The compositions for administration will commonly comprise an angiogenesis protein modulator dissolved in a pharmaceutically acceptable carrier, preferably an aqueous carrier. A variety of aqueous carriers can be used, e.g., buffered saline and the like. These solutions are sterile and generally free of undesirable matter. These compositions may be sterilized by conventional, well known sterilization techniques. The compositions may contain pharmaceutically acceptable auxiliary substances as required to approximate physiological conditions such as pH adjusting and buffering agents, toxicity adjusting agents and the like, for example, sodium acetate, sodium chloride, potassium chloride, calcium chloride, sodium lactate and the like. The concentration of active agent in these formulations can vary widely, and will be selected primarily based on fluid volumes, viscosities, body weight and the like in accordance with the particular mode of administration selected and the patient's needs (e.g., Remington's Pharmaceutical Science, 15th ed., Mack Publishing Company, Easton, Pa. (1980) and Goodman and Gillman, The Pharmacologial Basis of Therapeutics,(Hardman, J. G, Limbird, L. E, Molinoff, P. B., Ruddon, R. W, and Gilman, A. G., eds) TheMcGraw-Hill Companies, Inc.,1996).

[0295] Thus, a typical pharmaceutical composition for intravenous administration would be about 0.1 to 10 mg per patient per day. Dosages from 0.1 up to about 100 mg per patient per day may be used, particularly when the drug is administered to a secluded site and not into the blood stream, such as into a body cavity or into a lumen of an organ. Substantially higher dosages are possible in topical administration. Actual methods for preparing parenterally administrable compositions will be known or apparent to those skilled in the art, e.g., Remington's Pharmaceutical Science and Goodman and Gillman, The Pharmacologial Basis of Therapeutics, supra.

[0296] The compositions containing modulators of angiogenesis proteins can be administered for therapeutic or prophylactic treatments. In therapeutic applications, compositions are administered to a patient suffering from a disease (e.g., a cancer) in an amount sufficient to cure or at least partially arrest the disease and its complications. An amount adequate to accomplish this is defined as a “therapeutically effective dose.” Amounts effective for this use will depend upon the severity of the disease and the general state of the patient's health. Single or multiple administrations of the compositions may be administered depending on the dosage and frequency as required and tolerated by the patient. In any event, the composition should provide a sufficient quantity of the agents of this invention to effectively treat the patient. An amount of modulator that is capable of preventing or slowing the development of cancer in a mammal is referred to as a “prophylactically effective dose.” The particular dose required for a prophylactic treatment will depend upon the medical condition and history of the mammal, the particular cancer being prevented, as well as other factors such as age, weight, gender, administration route, efficiency, etc. Such prophylactic treatments may be used, e.g., in a mammal who has previously had cancer to prevent a recurrence of the cancer, or in a mammal who is suspected of having a significant likelihood of developing cancer.

[0297] It will be appreciated that the present angiogenesis protein-modulating compounds can be administered alone or in combination with additional angiogenesis modulating compounds or with other therapeutic agent, e.g., other anti-cancer agents or treatments.

[0298] In numerous embodiments, one or more nucleic acids, e.g., polynucleotides comprising nucleic acid sequences set forth in Table 1, such as antisense polynucleotides or ribozyrnes, will be introduced into cells, in vitro or in vivo. The present invention provides methods, reagents, vectors, and cells useful for expression of angiogenesis-associated polypeptides and nucleic acids using in vitro (cell-free), ex vivo or in vivo (cell or organism-based) recombinant expression systems.

[0299] The particular procedure used to introduce the nucleic acids into a host cell for expression of a protein or nucleic acid is application specific. Many procedures for introducing foreign nucleotide sequences into host cells may be used. These include the use of calcium phosphate transfection, spheroplasts, electroporation, liposomes, microinjection, plasma vectors, viral vectors and any of the other well known methods for introducing cloned genomic DNA, cDNA, synthetic DNA or other foreign genetic material into a host cell (see, e.g., Berger and Kimmel, Guide to Molecular Cloning Techniques, Methods in Enzymology volume 152 Academic Press, Inc., San Diego, Calif. (Berger), F. M. Ausubel et al., eds., Current Protocols, a joint venture between Greene Publishing Associates, Inc. and John Wiley & Sons, Inc., (supplemented through 1999), and Sambrook et al., Molecular Cloning—A Laboratory Manual (2nd Ed.), Vol. 1-3, Cold Spring Harbor Laboratory, Cold Spring Harbor, N.Y., 1989.

[0300] In a preferred embodiment, angiogenesis proteins and modulators are administered as therapeutic agents, and can be formulated as outlined above. Similarly, angiogenesis genes (including both the full-length sequence, partial sequences, or regulatory sequences of the angiogenesis coding regions) can be administered in a gene therapy application. These angiogenesis genes can include antisense applications, either as gene therapy (i.e. for incorporation into the genome) or as antisense compositions, as will be appreciated by those in the art.

[0301] Angiogenesis polypeptides and polynucleotides can also be administered as vaccine compositions to stimulate HTL, CTL and antibody responses. Such vaccine compositions can include, for example, lipidated peptides (e.g.,Vitiello, A. et al., J. Clin. Invest. 95:341, 1995), peptide compositions encapsulated in poly(DL-lactide-co-glycolide) (“PLG”) microspheres (see, e.g., Eldridge, et al., Milec. Immunol. 28:287-294, 1991: Alonso et al., Vaccine 12:299-306, 1994; Jones et al., Vaccine 13:675-681, 1995), peptide compositions contained in immune stimulating complexes (ISCOMS) (see, e.g. Takahashi et al., Nature 344:873-875, 1990; Hu et al., Clin Exp Immunol. 113:235-243, 1998), multiple antigen peptide systems (MAPs) (see e.g., Tam, J. P., Proc. Natl. Acad. Sci. U.S.A. 85:5409-5413, 1988; Tam, J. P., J. Immunol. Methods 196:17-32, 1996), peptides formulated as multivalent peptides; peptides for use in ballistic delivery systems, typically crystallized peptides, viral delivery vectors (Perkus, M. E. et al., In: Concepts in vaccine development, Kaufinann, S. H. E., ed., p. 379, 1996; Chakrabarti, S. et al., Nature 320:535, 1986; Hu, S. L. et al., Nature 320:537, 1986; Kieny, M. -P. et al., AIDS Bio/Technology 4:790, 1986; Top, F. H. et al., J. Infect. Dis. 124:148, 1971; Chanda, P. K. et al., Virology 175:535, 1990), particles of viral or synthetic origin (e.g., Kofler, N. et al., J. Immunol. Methods. 192:25, 1996; Eldridge, J. H. et al., Sem. Hematol. 30:16, 1993; Falo, L. D., Jr. et al., Nature Med. 7:649, 1995), adjuvants (Warren, H. S., Vogel, F. R., and Chedid, L. A. Annu. Rev. Immunol. 4:369, 1986; Gupta, R. K. et al., Vaccine 11:293, 1993), liposomes (Reddy, R. et al., J. Immunol. 148:1585, 1992; Rock, K. L., Immunol. Today 17:131, 1996), or, naked or particle absorbed cDNA (Ulmer, J. B. et al., Science 259:1745, 1993; Robinson, H. L., Hunt, L. A., and Webster, R. G., Vaccine 11:957, 1993; Shiver, J. W. et al., In: Concepts in vaccine development, Kaufmann, S. H. E., ed., p. 423, 1996; Cease, K. B., and Berzofsky, J. A., Annu. Rev. Immunol. 12:923, 1994 and Eldridge, J. H. et al., Sem. Hematol. 30:16, 1993). Toxin-targeted delivery technologies, also known as receptor mediated targeting, such as those of Avant Immunotherapeutics, Inc. (Needham, Mass.) may also be used.

[0302] Vaccine compositions often include adjuvants. Many adjuvants contain a substance designed to protect the antigen from rapid catabolism, such as aluminum hydroxide or mineral oil, and a stimulator of immune responses, such as lipid A, Bortadella pertussis or Mycobacterium tuberculosis derived proteins. Certain adjuvants are commercially available as, for example, Freund's Incomplete Adjuvant and Complete Adjuvant (Difco Laboratories, Detroit, Mich.); Merck Adjuvant 65 (Merck and Company, Inc., Rahway, N.J.); AS-2 (SmithKline Beecham, Philadelphia, Pa.); aluminum salts such as aluminum hydroxide gel (alum) or aluminum phosphate; salts of calcium, iron or zinc; an insoluble suspension of acylated tyrosine; acylated sugars; cationically or anionically derivatized polysaccharides; polyphosphazenes; biodegradable inicrospheres; monophosphoryl lipid A and quil A. Cytokines, such as GM-CSF, interleukin-2, -7, -12, and other like growth factors, may also be used as adjuvants.

[0303] Vaccines can be administered as nucleic acid compositions wherein DNA or RNA encoding one or more of the polypeptides, or a fragment thereof, is administered to a patient. This approach is described, for instance, in Wolff et. al., Science 247:1465 (1990) as well as U.S. Pat. Nos. 5,580,859; 5,589,466; 5,804,566; 5,739,118; 5,736,524; 5,679,647; WO 98/04720; and in more detail below. Examples of DNA-based delivery technologies include “naked DNA”, facilitated (bupivicaine, polymers, peptide-mediated) delivery, cationic lipid complexes, and particle-mediated (“gene gun”) or pressure-mediated delivery (see, e.g., U.S. Pat. No. 5,922,687).

[0304] For therapeutic or prophylactic immunization purposes, the peptides of the invention can be expressed by viral or bacterial vectors. Examples of expression vectors include attenuated viral hosts, such as vaccinia or fowlpox. This approach involves the use of vaccinia virus, for example, as a vector to express nucleotide sequences that encode angiogenic polypeptides or polypeptide fragments. Upon introduction into a host, the recombinant vaccinia virus expresses the immunogenic peptide, and thereby elicits an immune response. Vaccinia vectors and methods useful in immunization protocols are described in, e.g., U.S. Pat. No. 4,722,848. Another vector is BCG (Bacille Calmette Guerin). BCG vectors are described in Stover et al., Nature 351:456-460 (1991). A wide variety of other vectors useful for therapeutic administration or immunization e.g. adeno and adeno-associated virus vectors, retroviral vectors, Salmonella typhi vectors, detoxified anthrax toxin vectors, and the like, will be apparent to those skilled in the art from the description herein (see, e.g., Shata et al. (2000) Mol Med Today, 6: 66-71; Shedlock et al., J. Leukoc Biol 68,:793-806, 2000; Hipp et al., In Vivo 14:571-85, 2000).

[0305] Methods for the use of genes as DNA vaccines are well known, and include placing an angiogenesis gene or portion of an angiogenesis gene under the control of a regulatable promoter or a tissue-specific promoter for expression in an angiogenesis patient. The angiogenesis gene used for DNA vaccines can encode full-length angiogenesis proteins, but more preferably encodes portions of the angiogenesis proteins including peptides derived from the angiogenesis protein. In one embodiment, a patient is immunized with a DNA vaccine comprising a plurality of nucleotide sequences derived from an angiogenesis gene. For example, angiogenesis-associated genes or sequence encoding subfragments of an angiogenesis protein are introduced into expression vectors and tested for their immunogenicity in the context of Class I MHC and an ability to generate cytotoxic T cell responses. This procedure provides for production of cytotoxic T cell responses against cells which present antigen, including intracellular epitopes.

[0306] In a preferred embodiment, the DNA vaccines include a gene encoding an adjuvant molecule with the DNA vaccine. Such adjuvant molecules include cytokines that increase the immunogenic response to the angiogenesis polypeptide encoded by the DNA vaccine. Additional or alternative adjuvants are available.

[0307] In another preferred embodiment angiogenesis genes find use in generating animal models of angiogenesis. When the angiogenesis gene identified is repressed or diminished in angiogenesic tissue, gene therapy technology, e.g., wherein antisense RNA directed to the angiogenesis gene will also diminish or repress expression of the gene. Animal models of angiogenesis find use in screening for modulators of an angiogenesis-associated sequence or modulators of angiogenesis. Similarly, transgenic animal technology including gene knockout technology, for example as a result of homologous recombination with an appropriate gene targeting vector, will result in the absence or increased expression of the angiogenesis protein. When desired, tissue-specific expression or knockout of the angiogenesis protein may be necessary.

[0308] It is also possible that the angiogenesis protein is overexpressed in angiogenesis. As such, transgenic animals can be generated that overexpress the angiogenesis protein. Depending on the desired expression level, promoters of various strengths can be employed to express the transgene. Also, the number of copies of the integrated transgene can be determined and compared for a determination of the expression level of the transgene. Animals generated by such methods find use as animal models of angiogenesis and are additionally useful in screening for modulators to treat angiogenesis.

[0309] Kits for Use in Diagnostic and/or Prognostic Applications

[0310] For use in diagnostic, research, and therapeutic applications suggested above, kits are also provided by the invention. In the diagnostic and research applications such kits may include any or all of the following: assay reagents, buffers, angiogenesis-specific nucleic acids or antibodies, hybridization probes and/or primers, antisense polynucleotides, ribozymes, dominant negative angiogenesis polypeptides or polynucleotides, small molecules inhibitors of angiogenesis-associated sequences etc. A therapeutic product may include sterile saline or another pharmaceutically acceptable emulsion and suspension base.

[0311] In addition, the kits may include instructional materials containing directions (i.e., protocols) for the practice of the methods of this invention. While the instructional materials typically comprise written or printed materials they are not limited to such. Any medium capable of storing such instructions and communicating them to an end user is contemplated by this invention. Such media include, but are not limited to electronic storage media (e.g., magnetic discs, tapes, cartridges, chips), optical media (e.g., CD ROM), and the like. Such media may include addresses to internet sites that provide such instructional materials.

[0312] The present invention also provides for kits for screening for modulators of angiogenesis-associated sequences. Such kits can be prepared from readily available materials and reagents. For example, such kits can comprise one or more of the following materials: an angiogenesis-associated polypeptide or polynucleotide, reaction tubes, and instructions for testing angiogenic-associated activity. Optionally, the kit contains biologically active angiogenesis protein. A wide variety of kits and components can be prepared according to the present invention, depending upon the intended user of the kit and the particular needs of the user. Diagnosis would typically involve evaluation of a plurality of genes or products. The genes will be selected based on correlations with important parameters in disease which may be identified in historical or outcome data.

[0313] It is understood that the examples described above in no way serve to limit the true scope of this invention, but rather are presented for illustrative purposes. All publications, sequences of accession numbers, and Patent applications cited in this specification are herein incorporated by reference as if each individual publication or Patent application were specifically and individually indicated to be incorporated by reference.

### EXAMPLES

### Example 1

### Tissue Preparation, Labeling Chips, and Fingerprints

[0314] Purify Total RNA from Tissue Using TRIzol Reagent

[0315] Homogenize tissue samples in 1 ml of TRIzol per 50 mg of tissue using a Polytron 3100 homogenizer. The generator/probe used depends upon the tissue size. A generator that is too large for the amount of tissue to be homogenized will cause a loss of sample and lower RNA yield. TRIzol is added directly to frozen tissue, which is then homogenize. Following homogenization, insoluble material is removed by centrifugation at 7500× g for 15 min in a Sorvall superspeed or 12,000× g for 10 min. in an Eppendorf centrifuge at 4° C. The clear homogenate is transferred to a new tube for use. The samples may be frozen now at −60° to −70° C. (and kept for at least one month). The homogenate is mixed with 0.2 ml of chloroform per 1 ml of TRIzol reagent used in the original homogenization and incubated at room temp. for 2-3 minutes. The aqueous phase is then separated by centrifugation and transferred to a fresh tube and the RNA precipitated using isopropyl alcohol. The pellet is isolated by centrifugation, washed, air-dried, resuspended in an appropriate volume of DEPC H₂O, and the absorbance measured.

[0316] Purification of poly A+ mRNA from total RNA is performed as follows. Heat an oligotex suspension to 37° C. and mixing immediately before adding to RNA. The Elution Buffer is heated at 70° C. Warm up 2× Binding Buffer at 65° C. if there is precipitate in the buffer. Mix total RNA with DEPC-treated water, 2× Binding Buffer, and Oligotex according to Table 2 on page 16 of the Oligotex Handbook. Incubate for 3 minutes at 65° C. Incubate for 10 minutes at room temperature. Centrifuge for 2 minutes at 14,000 to 18,000 g. Remove supernatant without disturbing Oligotex pellet. A little bit of solution can be left behind to reduce the loss of Oligotex. Gently resuspend in Wash Buffer OW2 and pipet onto spin column. Centrifuge the spin column at full speed for 1 minute. Transfer spin column to a new collection tube and gently resuspend in Wash Buffer OW2 and centrifuge as describe herein. Transfer spin column to a new tube and elute with 20 to 100 ul of preheated (70° C.) Elution Buffer. Gently resuspend Oligotex resin by pipetting up and down. Centrifuge as above. Repeat elution with fresh elution buffer or use first eluate to keep the elution volume low. Read absorbance, using diluted Elution Buffer as the blank. Before proceeding with cDNA synthesis, precipitate the mRNA as follows: add 0.4 vol. of 7.5 M NH4OAc+2.5 vol. of cold 100% ethanol. Precipitate at −20° C. 1 hour to overnight (or 20-30 min. at −70° C.). Centrifuge at 14,000-16,000× g for 30 minutes at 4° C. Wash pellet with 0.5 ml of 80%ethanol (−20° C.) then centrifuge at 14,000-16,000× g for 5 minutes at room temperature. Repeat 80% ethanol wash. Air dry the ethanol from the pellet in the hood. Suspend pellet in DEPC H₂O at 1 ug/ul concentration.

[0317] To further Clean up total RNA using Qiagen's RNeasy kit, add no more than 100 ug to an RNeasy column. Adjust sample to a volume of 100 ul with RNase-free water. Add 350 ul Buffer RLT then 250 ul ethanol (100%) to the sample. Mix by pipetting (do not centrifuge) then apply sample to an RNeasy mini spin column. Centrifuge for 15 sec at >10,00 rpm. Transfer column to a new 2-ml collection tube. Add 500 ul Buffer RPE and centrifuge for 15 sec at >10,00 rpm. Discard flowthrough. Add 500 ul Buffer RPE and centrifuge for 15 sec at >10,000 rpm. Discard flowthrough then centrifuge for 2 min at maximum speed to dry column membrane. Transfer column to a new 1.5-ml collection tube and apply 30-50 ul of RNase-free water directly onto column membrane. Centrifuge 1 min at >10,000 rpm. Repeat elution. and read absorbance.

[0318] cDNA Synthesis Using Gibco's “SuperScript Choice System for cDNA Synthesis” Kit

[0319] First Strand cDNA synthesis is performed as follows. Use 5 ug of total RNA or 1 ug of polyA+ mRNA as starting material. For total RNA, use 2 ul of SuperScript RT. For polyA+ mRNA, use 1 ul of SuperScript RT. Final volume of first strand synthesis mix is 20 ul. RNA must be in a volume no greater than 10 ul. Incubate RNA with 1 ul of 100 pmol T7-T24 oligo for 10 min at 70 C. On ice, add 7 ul of: 4 ul 5× 1st Strand Buffer, 2 ul of 0.1M DTT, and 1 ul of 10 nM dNTP mix. Incubate at 37 C. for 2 min then add SuperScript RT. Incubate at 37 C. for 1 hour.

[0320] For the second strand synthesis, place 1st strand reactions on ice and add: 91 ul DEPC H₂O; 30 ul 5× 2nd Strand Buffer; 3 ul 10 mM dNTP mix; 1 ul 10 U/ul E. coli DNA Ligase; 4 ul 10 U/ul E. coli DNA Polymerase; and 1 ul 2 U/ul RNase H. Mix and incubate 2 hours at 16 C. Add 2 ul T4 DNA Polymerase. Incubate 5 min at 16 C. Add 10 ul of 0.5M EDTA. A further clean-up of DNA is performed using phenol:chloroform:isoamyl Alcohol (25:24:1) purification.

[0321] In vitro Transcription (IVT) and labeling with biotin is performed as follows: Pipet 1.5 ul of cDNA into a thin-wall PCR tube. Make NTP labeling mix by combining 2 ul T7 10× ATP (75 mM) (Ambion); 2 ul T7 10× GTP (75 mM) (Ambion); 1.5 ul T7 10× CTP (75 mM) (Ambion); 1.5 ul T7 10× UTP (75 mM) (Ambion); 3.75 ul 10 mM Bio-11-UTP (Boehringer-Mannheim/Roche or Enzo); 3.75 ul 10 nM Bio-16-CTP (Enzo); 2 ul 10× T7 transcription buffer (Ambion); and 2 ul 10× T7 enzyme mix (Ambion). The final volume is 20 ul. Incubate 6 hours at 37° C. in a PCR machine. The RNA can be furthered cleaned.

[0322] Fragmentation is performed as follows. 15 ug of labeled RNA is usually fragmented. Try to minimize the fragmentation reaction volume; a 10 ul volume is recommended but 20 ul is all right. Do not go higher than 20 ul because the magnesium in the fragmentation buffer contributes to precipitation in the hybridization buffer. Fragment RNA by incubation at 94 C. for 35 minutes in 1× Fragmentation buffer (5× Fragmentation buffer is 200 mM Tris-acetate, pH 8.1; 500 mM KOAc; 150 mM MgOAc). The labeled RNA transcript can be analyzed before and after fragmentation. Samples can be heated to 65° C. for 15 minutes and electrophoresed on 1% agarose/TBE gels to get an approximate idea of the transcript size range.

[0323] For hybridization, 200 ul (10 ug cRNA) of a hybridization mix is put on the chip. If multiple hybridizations are to be done (such as cycling through a 5 chip set), then it is recommended that an initial hybridization mix of 300 ul or more be made. The hybridization mix is: fragment labeled RNA (50 ng/ul final conc.); 50 pM 948-b control oligo; 1.5 pM BioB; 5 pM BioC; 25 pM BioD; 100 pM CRE; 0.1 mg/ml herring sperm DNA; 0.5 mg/ml acetylated BSA; and 300 ul with 1× MES hyb buffer.

[0324] Labeling is performed as follows: The hybridization reaction includes non-biotinylated IVT (purified by RNeasy columns); IVT antisense RNA 4 μg:μl; random Hexamers (1 μg/μl) 4 μl and water to 14 ul. The reaciton is incubated at 70° C., 10 min. Reverse transcriptionis performed in the following reaction: 5× First Strand (BRL) buffer, 6 μl; 0.1 M DTT, 3 μl; 50× dNTP mix, 0.6 μl; H₂O, 2.4 μl; Cy3 or CyS dUTP (lmM), 3 pL; SS RT II (BRL), 1 μl in a final volume of 16 μl. Add to hybridization reaction. Incubate 30 min., 42° C. Add 1 μl SSII and incubate another hour. Put on ice. 50× dNTP mix (25 mM of cold dATP, dCTP, and dGTP, 10 mM of dTTP: 25 μl each of 100 mM dATP, dCTP, and dGTP; 10 μl of 100 mM dTTP to 15 μl H₂O. dNTPs from Pharmacia). RNA degradation is performed as follows. Add 86 μl H₂O, 1.5 μl 1M NaOH/2 mM EDTA and incubate at 65° C., 10 min. For U-Con 30, 500 μl TE/sample spin at 7000 g for 10 min, save flow through for purification. For Qiagen purification, suspend u-con recovered material in 500 μl buffer PB and proceed using Qiagen protocol. For DNAse digestion, add 1 ul of 1/100dil of DNAse/30 ul Rx and incubate at 37° C. for 15 min. Incubate at 5 min 95° C. to denature the DNAse/.

[0325] For sample preparation, add Cot-1 DNA, 10 μl; 50× dNTPs, 1 μl; 20× SSC, 2.3 μl; Na pyro phosphate, 7.5 μl; 10 mg/ml Herring sperm DNA; 1 ul of 1/10 dilution to 21.8 final vol. Dry in speed vac. Resuspend in 15 μl H₂O. Add 0.38 μl 10% SDS. Heat 95° C., 2 min and slow cool at room temp. for 20 min. Put on slide and hybridize overnight at 64° C. Washing after the hybridization: 3× SSC0.03% SDS: 2 min., 37.5 mls 20× SSC+0.75 mls 10% SDS in 250 mls H2O; 1× SSC: 5 min., 12.5 mls 20× SSC in 250 mls H2O; 0.2× SSC: 5 min., 2.5 mls 20× SSC in 250 mls H2O. Dry slides and scan at appropiate PMT's and channels.

### Example 2

### A Model of Angiogenesis is Used to Determine Expression in Angiogenesis

[0326] In the model of angiogenesis used to determine expression of angiogenesis-associated sequences, human umbilical vein endothelial cells (HUVEC) were obtained, e.g., as passage 1 (p1) frozen cells from Cascade Biologics (Oregon) and grown in maintenance medium: Medium 199 (Life Technologies) supplemented with 20% pooled human serum, 100 mg/ml heparin and 75 mg/ml endothelial cell growth supplements (Sigma) and gentamicin (Life Technologies). An in vitro cell system model was used in which 2×10⁵ HUVECs were cultured in 0.5 ml 3 mgs/ml plasminogen-depleted fibrinogen (Calbiochem, San Diego, Calif.) that was polymerized by the addition of 1 unit of maintenance medium supplemented with 100 ng/ml VEGF and HGF and 10 ng/ml TGF-a (R&D Systems, Minneapolis, Minn.) added (growth medium). The growth medium was replaced every 2 days. Samples for RNA were collected, e.g., at 0, 2, 6, 15, 24, 48, and 96 hours of culture. The fibrin clots were placed in Trizol (Life Technologies) and disrupted using a Tissuemizer. Thereafter standard procedures were used for extracting the RNA (e.g., Example 1).

[0327] Angiogenesis associated sequences thus identified are shown in Table 1. As indicated, some of the Accession numbers include expression sequence tags (ESTs). Thus, in one embodiment herein, genes within an expression profile, also termed expression profile genes, include ESTs and are not necessarily full length.

TABLE 1

AAA4 DNA sequence
Gene name: CGI-100 protein
Unigene number: Hs.275253
Probeset Accession #: AA089688
Nucleic Acid Accession #: NM_016040 cluster
Coding sequence: 142-831 (predicted start/stop codons underlined)

| | |
|---|---|
| GTTCGCCGCC GCCGCGCCGG CCACCTGGAG TTTTTTCAGA CTCCAGATTT CCCTGTCAAC | 60 |
| CACGAGGAGT CCAGAGAGGA AACGCGGAGC GGAGACAACA GTACCTGACG CCTCTTTCAG | 120 |
| CCCGGGATCG CCCCAGCAGG GATGGGCGAC AAGATCTGGC TGCCCTTCCC CGTGCTCCTT | 180 |
| CTGGCCGCTC TGCCTCCGGT GCTGCTGCCT GGGGCGGCCG GCTTCACACC TTCCCTCGAT | 240 |
| AGCGACTTCA CCTTTACCCT TCCCGCCGGC CAGAAGGAGT GCTTCTACCA GCCCATGCCC | 300 |
| CTGAAGGCCT CGCTGGAGAT CGAGTACCAA GTTTTAGATG GAGCAGGATT AGATATTGAT | 360 |
| TTCCATCTTG CCTCTCCAGA AGGCAAAACC TTAGTTTTTG AACAAAGAAA ATCAGATGGA | 420 |
| GTTCACACTG TAGAGACTGA AGTTGGTGAT TACATGTTCT GCTTTGACAA TACATTCAGC | 480 |
| ACCATTTCTG AGAAGGTGAT TTTCTTTGAA TTAATCCTGG ATAATATGGG AGAACAGGCA | 540 |
| CAAGAACAAG AAGATTGGAA GAAATATATT ACTGGCACAG ATATATTGGA TATGAAACTG | 600 |
| GAAGACATCC TGGAATCCAT CAACAGCATC AAGTCCAGAC TAAGCAAAAG TGGGCACATA | 660 |
| CAAACTCTGC TTAGAGCATT TGAAGCTCGT GATCGAAACA TACAAGAAAG CAACTTTGAT | 720 |
| AGAGTCAATT TCTGGTCTAT GGTTAATTTA GTGGTCATGG TGGTGGTGTC AGCCATTCAA | 780 |
| GTTTATATGC TGAAGAGTCT GTTTGAAGAT AAGAGGAAAA GTAGAACTTA AAACTCCAAA | 840 |
| CTAGAGTACG TAACATTGAA AAATGAGGCA TAAAAATGCA ATAAACTGTT ACAGTCAAGA | 900 |
| CCATTAATGG TCTTCTCCAA AATATTTTGA GATATAAAAG TAGGAAACAG GTATAATTTT | 960 |
| AATGTGAAAA TTAAGTCTTC ACTTTCTGTG CAAGTAATCC TGCTGATCCA GTTGTACTTA | 1020 |
| AGTGTGTAAC AGGAATATTT TGCAGAATAT AGGTTTAACT GAATGAAGCC ATATTAATAA | 1080 |
| CTGCATTTTC CTAACTTTGA AAAATTTTGC AAATGTCTTA GGTGATTTAA ATAAATGAGT | 1140 |
| ATTGGGCCTA AA | |

AAA7 DNA sequence
Gene name: Endothelial differentiation, sphingolipid G-protein-coupled receptor, 1
(EDG1)
Unigene number: Hs.154210
Probeset Accession #: M31210
Nucleic Acid Accession #: NM_001400 cluster
Coding sequence: 251-1396 (predicted start/stop codons underlined)

| | |
|---|---|
| TCTAAAGGTC GGGGGCAGCA GCAAGATGCG AAGCGAGCCG TACAGATCCC GGGCTCTCCG | 60 |
| AACGCAACTT CGCCCTGCTT GAGCGAGGCT GCGGTTTCCG AGGCCCTCTC CAGCGAAGGA | 120 |
| AAAGCTACAC AAAAAGCCTG GATCACTCAT CGAACCACCC CTGAAGCCAG TGAAGGCTCT | 180 |
| CTCGCCTCGC CCTCTAGCGT TCGTCTGGAG TAGCGCCACC CCGGCTTCCT GGGGACACAG | 240 |
| GGTTGGCACC ATGGGGCCCA CCAGCGTCCC GCTGGTCAAG GCCCACCGCA GCTCGGTCTC | 300 |
| TGACTACGTC AACTATGATA TCATCGTCCG GCATTACAAC TACACGGGAA AGCTGAATAT | 360 |
| CAGCGCGGAC AAGGAGAACA GCATTAAACT GACCTCGGTG GTGTTCATTC TCATCTGCTG | 420 |
| CTTTATCATC CTGGAGAACA TCTTTGTCTT GCTGACCATT TGGAAAACCA AGAAATTCCA | 480 |
| CCGACCCATG TACTATTTTA TTGGCAATCT GGCCCTCTCA GACCTGTTGG CAGGAGTAGC | 540 |
| CTACACAGCT AACCTGCTCT TGTCTGGGGC CACCACCTAC AAGCTCACTC CCGCCCAGTG | 600 |
| GTTTCTGCGG GAAGGGAGTA TGTTTGTGGC CCTGTCAGCC TCCGTGTTCA GTCTCCTCGC | 660 |
| CATCGCCATT GAGCGCTATA TCACAATGCT GAAAATGAAA CTCCACAACG GGAGCAATAA | 720 |
| CTTCCGCCTC TTCCTGCTAA TCAGCGCCTG CTGGGTCATC TCCCTCATCC TGGGTGGCCT | 780 |
| GCCTATCATG GGCTGGAACT GCATCAGTGC GCTGTCCAGC TGCTCCACCG TGCTGCCGCT | 840 |
| CTACCACAAG CACTATATCC TCTTCTGCAC CACGGTCTTC ACTCTGCTTC TGCTCTCCAT | 900 |
| CGTCATTCTG TACTGCAGAA TCTACTCCTT GGTCAGGACT CGGAGCCGCC GCCTGACGTT | 960 |
| CCGCAAGAAC ATTTCCAAGG CCAGCCGCAG CTCTGAGAAT GTGGCGCTGC TCAAGACCGT | 1020 |
| AATTATCGTC CTGAGCGTCT TCATCGCCTG CTGGGCACCG CTCTTCATCC TGCTCCTGCT | 1080 |
| GGATGTGGGC TGCAAGGTGA AGACCTGTGA CATCCTCTTC AGAGCGGAGT ACTTCCTGGT | 1140 |
| GTTACCTGTG CTCAACTCCG GCACCAACCC CATCATTTAC ACTCTGACCA ACAAGGAGAT | 1200 |
| GCGTCGGGCC TTCATCCGGA TCATGTCCTG CTGCAAGTGC CCGAGCGGAG ACTCTGCTGG | 1260 |
| CAAATTCAAG CGACCCATCA TCGCCGGCAT GGAATTCAGC CGCAGCAAAT CGGACAATTC | 1320 |
| CTGGCACCCC CAGAAAGACG AAGGGGACAA CCCAGAGACC ATTATGTCTT CTGGAAACGT | 1380 |
| CAACTCTTCT TCCTAGAACT GGAAGCTGTC CACCCACCGG AAGCGCTCTT TACTTGGTCG | 1440 |
| CTGGCCACCC CAGTGTTTGG AAAAAAATCT CTGGGCTTCG ACTGCTGCCA GGGAGGAGCT | 1500 |
| GCTGCAAGCC AGAGGGAGGA AGGGGGAGAA TACGAACAGC CTGGTGGTGT CGGGTGTTGG | 1560 |
| TGGGTAGAGT TAGTTCCTGT GAACAATGCA CTGGGAAGGG TGGAGATCAG GTCCCGGCCT | 1620 |
| GGAATATATA TTCTACCCCC CTGGAGCTTT GATTTTGCAC TGAGCCAAAG GTCTAGCATT | 1680 |
| GTCAAGCTCC TAAAGGGTTC ATTTGGCCCC TCCTCAAAGA CTAATGTCCC CATGTGAAAG | 1740 |
| CGTCTCTTTG TCTGGAGCTT TGAGGAGATG TTTTCCTTCA CTTTAGTTTC AAACCCAAGT | 1800 |
| GAGTGTGTGC ACTTCTGCTT CTTTAGGGAT GCCCTGTACA TCCCACACCC CACCCTCCCT | 1860 |
| TCCCTTCATA CCCCTCCTCA ACGTTCTTTT ACTTTATACT TTAACTACCT GAGAGTTATC | 1920 |
| AGAGCTGGGG TTGTGGAATG ATCGATCATC TATAGCAAAT AGGCTATGTT GAGTACGTAG | 1980 |
| GCTGTGGGAA GATGAAGATG GTTTGGAGGT GTAAAACAAT GTCCTTCGCT GAGGCCAAAG | 2040 |
| TTTCCATGTA AGCGGGATCC GTTTTTTGGA ATTTGGTTGA AGTCACTTTG ATTTCTTTAA | 2100 |
| AAAACATCTT TTCAATGAAA TGTGTTACCA TTTCATATCC ATTGAAGCCG AAATCTGCAT | 2160 |
| AAGGAAGCCC ACTTTATCTA AATGATATTA GCCAGGATCC TTGGTGTCCT AGGAGAAACA | 2220 |
| GACAAGCAAA ACAAAGTGAA AACCGAATGG ATTAACTTTT GCAAACCAAG GGAGATTTCT | 2280 |
| TAGCAAATGA GTCTAACAAA TATGACATCC GTCTTTCCCA CTTTTGTTGA TGTTTATTTC | 2340 |
| AGAATCTTGT GTGATTCATT TCAAGCAACA ACATGTTGTA TTTTGTTGTG TTAAAAGTAC | 2400 |
| TTTTCTTGAT TTTTGAATGT ATTTGTTTCA GGAAGAAGTC ATTTTATGGA TTTTTCTAAC | 2460 |
| CCGTGTTAAC TTTTCTAGAA TCCACCCTCT TGTGCCCTTA AGCATTACTT TAACTGGTAG | 2520 |
| GGAACGCCAG AACTTTTAAG TCCAGCTATT CATTAGATAG TAATTGAAGA TATGTATAAA | 2580 |
| TATTACAAAG AATAAAAATA TATTACTGTC TCTTTAGTAT GGTTTTCAGT GCAATTAAAC | 2640 |
| CGAGAGATGT CTTGTTTTTT TAAAAAGAAT AGTATTTAAT AGGTTTCTGA CTTTTGTGGA | 2700 |
| TCATTTTGCA CATAGCTTTA TCAACTTTTA AACATTAATA AACTGATTTT TTTAAAG | |

AAB3 DNA sequence
Gene name: Solute carrier family 20 (phosphate transporter), member 1, Human
leukaemia virus receptor 1 (GLVR1)
Unigene number: Hs.78452
Probeset Accession #: L20859
Nucleic Acid Accession #: NM_005415 cluster
Coding sequence: predicted 371-2410 (predicted start/stop codons underlined)

| | |
|---|---|
| GAGCTGTCCC CGGTGCCGCC GACCCGGGCC GTGCCGTGTG CCCGTGGCTC CAGCCGCTGC | 60 |
| CGCCTCGATC TCCTCGTCTC CCGCTCCGCC CTCCCTTTTC CCTGGATGAA CTTGCGTCCT | 120 |
| TTCTCTTCTC CGCCATGGAA TTCTGCTCCG TGCTTTTAGC CCTCCTGAGC CAAAGAAACC | 180 |
| CCAGACAACA GATGCCCATA CGCAGCGTAT AGCAGTAACT CCCCAGCTCG GTTTCTGTGC | 240 |
| CGTAGTTTAC AGTATTTAAT TTTATATAAT ATATATTATT TATTATAGCA TTTTTGATAC | 300 |
| CTCATATTCT GTTTACACAT CTTGAAAGGC GCTCAGTAGT TCTCTTACTA AACAACCACT | 360 |
| ACTCCAGAGA ATGGCAACGC TGATTACCAG TACTACAGCT GCTACCGCCG CTTCTGGTCC | 420 |
| TTTGGTGGAC TACCTATGGA TGCTCATCCT GGGCTTCATT ATTGCATTTG TCTTGGCATT | 480 |
| CTCCGTGGGA GCCAATGATG TAGCAAATTC TTTTGGTACA GCTGTGGGCT CAGGTGTAGT | 540 |
| GACCCTGAAG CAAGCCTGCA TCCTAGCTAG CATCTTTGAA ACAGTGGGCT CTGTCTTACT | 600 |
| GGGGGCCAAA GTGAGCGAAA CCATCCGGAA GGGCTTGATT GACGTGGAGA TGTACAACTC | 660 |
| GACTCAAGGG CTACTGATGG CCGGCTCAGT CAGTGCTATG TTTGGTTCTG CTGTGTGGCA | 720 |
| ACTCGTGGCT TCGTTTTTGA AGCTCCCTAT TTCTGGAACC CATTGTATTG TTGGTGCAAC | 780 |
| TATTGGTTTC TCCCTCGTGG CAAAGGGGCA GGAGGGTGTC AAGTGGTCTG AACTGATAAA | 840 |
| AATTGTGATG TCTTGGTTCG TGTCCCCACT GCTTTCTGGA ATTATGTCTG GAATTTTATT | 900 |
| CTTCCTGGTT CGTGCATTCA TCCTCCATAA GGCAGATCCA GTTCCTAATG GTTTGCGAGC | 960 |
| TTTGCCAGTT TTCTATGCCT GCACAGTTGG AATAAACCTC TTTTCCATCA TGTATACTGG | 1020 |
| AGCACCGTTG CTGGGCTTTG ACAAACTTCC TCTGTGGGGT ACCATCCTCA TCTCGGTGGG | 1080 |
| ATGTGCAGTT TTCTGTGCCC TTATCGTCTG GTTCTTTGTA TGTCCCAGGA TGAAGAGAAA | 1140 |
| AATTGAACGA GAAATAAAGT GTAGTCCTTC TGAAAGCCCC TTAATGGAAA AAAAGAATAG | 1200 |
| CTTGAAAGAA GACCATGAAG AAACAAAGTT GTCTGTTGGT GATATTGAAA ACAAGCATCC | 1260 |
| TGTTTCTGAG GTAGGGCCTG CCACTGTGCC CCTCCAGGCT GTGGTGGAGG AGAGAACAGT | 1320 |
| CTCATTCAAA CTTGGAGATT TGGAGGAAGC TCCAGAGAGA GAGAGGCTTC CCAGCGTGGA | 1380 |
| CTTGAAAGAG GAAACCAGCA TAGATAGCAC CGTGAATGGT GCAGTGCAGT TGCCTAATGG | 1440 |
| GAACCTTGTC CAGTTCAGTC AAGCCGTCAG CAACCAAATA AACTCCAGTG GCCACTCCCA | 1500 |
| GTATCACACC GTGCATAAGG ATTCCGGCCT GTACAAAGAG CTACTCCATA AATTACATCT | 1560 |
| TGCCAAGGTG GGAGATTGCA TGGGAGACTC CGGTGACAAA CCCTTAAGGC GCAATAATAG | 1620 |
| CTATACTTCC TATACCATGG CAATATGTGG CATGCCTCTG GATTCATTCC GTGCCAAAGA | 1680 |
| AGGTGAACAG AAGGGCGAAG AAATGGAGAA GCTGACATGG CCTAATGCAG ACTCCAAGAA | 1740 |
| GCGAATTCGA ATGGACAGTT ACACCAGTTA CTGCAATGCT GTGTCTGACC TTCACTCAGC | 1800 |
| ATCTGAGATA GACATGAGTG TCAAGGCAGC GATGGGTCTA GGTGACAGAA AAGGAAGTAA | 1860 |
| TGGCTCTCTA GAAGAATGGT ATGACCAGGA TAAGCCTGAA GTCTCTCTCC TCTTCCAGTT | 1920 |
| CCTGCAGATC CTTACAGCCT GCTTTTGGTC ATTCGCCCAT GGTGGCAATG ACGTAAGCAA | 1980 |
| TGCCATTGGG CCTCTGGTTG CTTTATATTT GGTTTATGAC ACAGGAGATG TTTCTTCAAA | 2040 |
| AGTGGCAACA CCAATATGGC TTCTACTCTA TGGTGGTGTT GGTATCTGTG TTGGTCTGTG | 2100 |
| GGTTTGGGGA AGAAGAGTTA TCCAGACCAT GGGGAAGGAT CTGACACCGA TCACACCCTC | 2160 |
| TAGTGGCTTC AGTATTGAAC TGGCATCTGC CCTCACTGTG GTGATTGCAT CAAATATTGG | 2220 |
| CCTTCCCATC AGTACAACAC ATTGTAAAGT GGGCTCTGTT GTGTCTGTTG GCTGGCTCCG | 2280 |
| GTCCAAGAAG GCTGTTGACT GGCGTCTCTT TCGTAACATT TTTATGGCCT GGTTTGTCAC | 2340 |
| AGTCCCCATT TCTGGAGTTA TCAGTGCTGC CATCATGGCA ATCTTCAGAT ATGTCATCCT | 2400 |
| CAGAATGTGA AGCTGTTTGA GATTAAAATT TGTGTCAATG TTTGGGACCA TCTTAGGTAT | 2460 |
| TCCTGCTCCC CTGAAGAATG ATTACAGTGT TAACAGAAGA CTGACAAGAG TCTTTTTATT | 2520 |
| TGGGAGCAGA GGAGGGAAGT GTTACTTGTG CTATAACTGC TTTTGTGCTA AATATGAATT | 2580 |
| GTCTCAAAAT TAGCTGTGTA AAATAGCCCG GGTTCCACTG GCTCCTGCTG AGGTCCCCTT | 2640 |
| TCCTTCTGGG CTGTGAATTC CTGTACATAT TTCTCTACTT TTTGTATCAG GCTTCAATTC | 2700 |
| CATTATGTTT TAATGTTGTC TCTGAAGATG ACTTGTGATT TTTTTTTCTT TTTTTTAAAC | 2760 |
| CATGAAGAGC CGTTTGACAG AGCATGCTCT GCGTTGTTGG TTTCACCAGC TTCTGCCCTC | 2820 |
| ACATGCACAG GGATTTAACA ACAAAAATAT AACTACAACT TCCCTTGTAG TCTCTTATAT | 2880 |
| AAGTAGAGTC CTTGGTACTC TGCCCTCCTG TCAGTAGTGG CAGGATCTAT TGGCATATTC | 2940 |
| GGGAGCTTCT TAGAGGGATG AGGTTCTTTG AACACAGTGA AAATTTAAAT TAGTAACTTT | 3000 |
| TTTGCAAGCA GTTTATTGAC TGTTATTGCT AAGAAGAAGT AAGAAAGAAA AAGCCTGTTG | 3060 |
| GCAATCTTGG TTATTTCTTT AAGATTTCTG GCAGTGTGGG ATGGATGAAT GAAGTGGAAT | 3120 |
| GTGAACTTTG GGCAAGTTAA ATGGGACAGC CTTCCATGTT CATTTGTCTA CCTCTTAACT | 3180 |
| GAATAAAAAA GCCTACAGTT TTTAGAAAAA ACCCGAATTC | |

AAB4 DNA sequence
Gene name: Matrix metalloproteinase 10 (stromelysin 2)
Unigene number: Hs.2258
Probeset Accession #: X07820
Nucleic Acid Accession #: NM_002425
Coding sequence: predicted 23-1453 (predicted start/stop codons underlined)

| | |
|---|---|
| AAAGAAGGTA AGGGCAGTGA GAATGATGCA TCTTGCATTC CTTGTGCTGT TGTGTCTGCC | 60 |
| AGTCTGCTCT GCCTATCCTC TGAGTGGGGC AGCAAAAGAG GAGGACTCCA ACAAGGATCT | 120 |
| TGCCCAGCAA TACCTAGAAA AGTACTACAA CCTCGAAAAG GATGTGAAAC AGTTTAGAAG | 180 |
| AAAGGACAGT AATCTCATTG TTAAAAAAAT CCAAGGAATG CAGAAGTTCC TTGGGTTGGA | 240 |
| GGTGACAGGG AAGCTAGACA CTGACACTCT GGAGGTGATG CGCAAGCCCA GGTGTGGAGT | 300 |
| TCCTGACGTT GGTCACTTCA GCTCCTTTCC TGGCATGCCG AAGTGGAGGA AAACCCACCT | 360 |
| TACATACAGG ATTGTGAATT ATACACCAGA TTTGCCAAGA GATGCTGTTG ATTCTGCCAT | 420 |
| TGAGAAAGCT CTGAAAGTCT GGGAAGAGGT GACTCCACTC ACATTCTCCA GGCTGTATGA | 480 |
| AGGAGAGGCT GATATAATGA TCTCTTTCGC AGTTAAAGAA CATGGAGACT TTTACTCTTT | 540 |
| TGATGGCCCA GGACACAGTT TGGCTCATGC CTACCCACCT GGACCTGGGC TTTATGGAGA | 600 |
| TATTCACTTT GATGATGATG AAAAATGGAC AGAAGATGCA TCAGGCACCA ATTTATTCCT | 660 |
| CGTTGCTGCT CATGAACTTG GCCACTCCCT GGGGCTCTTT CACTCAGCCA ACACTGAAGC | 720 |
| TTTGATGTAC CCACTCTACA ACTCATTCAC AGAGCTCGCC CAGTTCCGCC TTTCGCAAGA | 780 |
| TGATGTGAAT GGCATTCAGT CTCTCTACGG ACCTCCCCCT GCCTCTACTG AGGAACCCCT | 840 |
| GGTGCCCACA AAATCTGTTC CTTCGGGATC TGAGATGCCA GCCAAGTGTG ATCCTGCTTT | 900 |
| GTCCTTCGAT GCCATCAGCA CTCTGAGGGG AGAATATCTG TTCTTTAAAG ACAGATATTT | 960 |
| TTGGCGAAGA TCCCACTGGA ACCCTGAACC TGAATTTCAT TTGATTTCTG CATTTTGGCC | 1020 |
| CTCTCTTCCA TCATATTTGG ATGCTGCATA TGAAGTTAAC AGCAGGGACA CCGTTTTTAT | 1080 |
| TTTTAAAGGA AATGAGTTCT GGGCCATCAG AGGAAATGAG GTACAAGCAG GTTATCCAAG | 1140 |
| AGGCATCCAT ACCCTGGGTT TTCCTCCAAC CATAAGGAAA ATTGATGCAG CTGTTTCTGA | 1200 |
| CAAGGAAAAG AAGAAAACAT ACTTCTTTGC AGCGGACAAA TACTGGAGAT TTGATGAAAA | 1260 |
| TAGCCAGTCC ATGGAGCAAG GCTTCCCTAG ACTAATAGCT GATGACTTTC CAGGAGTTGA | 1320 |
| GCCTAAGGTT GATGCTGTAT TACAGGCATT TGGATTTTTC TACTTCTTCA GTGGATCATC | 1380 |
| ACAGTTTGAG TTTGACCCCA ATGCCAGGAT GGTGACACAC ATATTAAAGA GTAACAGCTG | 1440 |
| GTTACATTGC TAGGCGAGAT AGGGGGAAGA CAGATATGGG TGTTTTTAAT AAATCTAATA | 1500 |
| ATTATTCATC TAATGTATTA TGAGCCAAAA TGGTTAATTT TTCCTGCATG TTCTGTGACT | 1560 |
| GAAGAAGATG AGCCTTGCAG ATATCTGCAT GTGTCATGAA GAATGTTTCT GGAATTCTTC | 1620 |
| ACTTGCTTTT GAATTGCACT GAACAGAATT AAGAAATACT CATGTGCAAT AGGTGAGAGA | 1680 |
| ATGTATTTTC ATAGATGTGT TATTACTTCC TCAATAAAAA GTTTTATTTT GGGCCTGTTC | 1740 |
| CTT | |

AAB6 DNA sequence
Gene name: Podocalyxin-like
Unigene number: Hs.16426
Probeset Accession #: U97519
Nucleic Acid Accession #: NM_005397 cluster
Coding sequence: 251-1837 (predicted start/stop codons underlined)

| | |
|---|---|
| AAACGCCGCC CAGGACGCAG CCGCCGCCGC CGCCGCTCCT CTGCCACTGG CTCTGCGCCC | 60 |
| CAGCCCGGCT CTGCTGCAGC GGCAGGGAGG AAGAGCCGCC GCAGCGCGAC TCGGGAGCCC | 120 |
| CGGGCCACAG CCTGGCCTCC GGAGCCACCC ACAGGCCTCC CCGGGCGGCG CCCACGCTCC | 180 |
| TACCGCCCGG ACGCGCGGAT CCTCCGCCGG CACCGCAGCC ACCTGCTCCC GGCCCAGAGG | 240 |
| CGACGACACG ATGCGCTGCG CGCTGGCGCT CTCGGCGCTG CTGCTACTGT TGTCAACGCC | 300 |
| GCCGCTGCTG CCGTCGTCGC CGTCGCCGTC GCCGTCGCCG TCGCCCTCCC AGAATGCAAC | 360 |
| CCAGACTACT ACGGACTCAT CTAACAAAAC AGCACCGACT CCAGCATCCA GTGTCACCAT | 420 |
| CATGGCTACA GATACAGCCC AGCAGAGCAC AGTCCCCACT TCCAAGGCCA ACGAAATCTT | 480 |
| GGCCTCGGTC AAGGCGACCA CCCTTGGTGT ATCCAGTGAC TCACCGGGGA CTACAACCCT | 540 |
| GGCTCAGCAA GTCTCAGGCC CAGTCAACAC TACCGTGGCT AGAGGAGGCG GCTCAGGCAA | 600 |
| CCCTACTACC ACCATCGAGA GCCCCAAGAG CACAAAAAGT GCAGACACCA CTACAGTTGC | 660 |
| AACCTCCACA GCCACAGCTA AACCTAACAC CACAAGCAGC CAGAATGGAG CAGAAGATAC | 720 |
| AACAAACTCT GGGGGGAAAA GCAGCCACAG TGTGACCACA GACCTCACAT CCACTAAGGC | 780 |
| AGAACATCTG ACGACCCCTC ACCCTACAAG TCCACTTAGC CCCCGACAAC CCACTTTGAC | 840 |
| GCATCCTGTG GCCACCCCAA CAAGCTCGGG ACATGACCAT CTTATGAAAA TTTCAAGCAG | 900 |
| TTCAAGCACT GTGGCTATCC CTGGCTACAC CTTCACAAGC CCGGGGATGA CCACCACCCT | 960 |
| ACCGTCATCG GTTATCTCGC AAAGAACTCA ACAGACCTCC AGTCAGATGC CAGCCAGCTC | 1020 |
| TACGGCCCCT TCCTCCCAGG AGACAGTGCA GCCCACGAGC CCGGCAACGG CATTGAGAAC | 1080 |
| ACCTACCCTG CCAGAGACCA TGAGCTCCAG CCCCACAGCA GCATCAACTA CCCACCGATA | 1140 |
| CCCCAAAACA CCTTCTCCCA CTGTGGCTCA TGAGAGTAAC TGGGCAAAGT GTGAGGATCT | 1200 |
| TGAGACACAG ACACAGAGTG AGAAGCAGCT CGTCCTGAAC CTCACAGGAA ACACCCTCTG | 1260 |
| TGCAGGGGGC GCTTCGGATG AGAAATTGAT CTCACTGATA TGCCGAGCAG TCAAAGCCAC | 1320 |
| CTTCAACCCG GCCCAAGATA AGTGCGGCAT ACGGCTGGCA TCTGTTCCAG GAAGTCAGAC | 1380 |
| CGTGGTCGTC AAAGAAATCA CTATTCACAC TAAGCTCCCT GCCAAGGATG TGTACGAGCG | 1440 |
| GCTGAAGGAC AAATGGGATG AACTAAAGGA GGCAGGGGTC AGTGACATGA AGCTAGGGGA | 1500 |
| CCAGGGGCCA CCGGAGGAGG CCGAGGACCG CTTCAGCATG CCCCTCATCA TCACCATCGT | 1560 |
| CTGCATGGCG TCATTCCTGC TCCTCGTGGC GGCCCTCTAT GGCTGCTGCC ACCAGCGCCT | 1620 |
| CTCCCAGAGG AAGGACCAGC AGCGGCTAAC AGAGGAGCTG CAGACAGTGG AGAATGGTTA | 1680 |
| CCATGACAAC CCAACACTGG AAGTGATGGA GACCTCTTCT GAGATGCAGG AGAAGAAGGT | 1740 |
| GGTCAGCCTC AACGGGGAGC TGGGGGACAG CTGGATCGTC CCTCTGGACA ACCTGACCAA | 1800 |
| GGACGACCTG GATGAGGAGG AAGACACACA CCTCTAGTCC GGTCTGCCGG TGGCCTCCAG | 1860 |
| CAGCACCACA GAGCTCCAGA CCAACCACCC CAAGTGCCGT TTGGATGGGG AAGGGAAAGA | 1920 |
| CTGGGGAGGG AGAGTGAACT CCGAGGGGTG TCCCCTCCCA ATCCCCCCAG GGCCTTAATT | 1980 |
| TTTCCCTTTT CAACCTGAAC AAATCACATT CTGTCCAGAT TCCTCTTGTA AAATAACCCA | 2040 |
| CTAGTGCCTG AGCTCAGTGC TGCTGGATGA TGAGGGAGAT CAAGAAAAAG CCACGTAAGG | 2100 |
| GACTTTATAG ATGAACTAGT GGAATCCCTT CATTCTGCAG TGAGATTGCC GAGACCTGAA | 2160 |
| GAGGGTAAGT GACTTGCCCA AGGTCAGAGC CACTTGGTGA CAGAGCCAGG ATGAGAACAA | 2220 |
| AGATTCCATT TGCACCATGC CACACTGCTG TGTTCACATG TGCCTTCCGT CCAGAGCAGT | 2280 |
| CCCGGGCAGG GGTGAAACTC CAGCAGGTGG CTGGGCTGGA AAGGAGGGCA GGGCTACATC | 2340 |
| CTGGCTCGGT GGGATCTGAC GACCTGAAAG TCCAGCTCCC AAGTTTTCCT TCTCCTACCC | 2400 |
| CAGCCTCGTG TACCCATCTT CCCACCCTCT ATGTTCTTAC CCCTCCCTAC ACTCAGTGTT | 2460 |
| TGTTCCCACT TACTCTGTCC TGGGGCCTCT GGGATTAGCA CAGGTTATTC ATAACCTTGA | 2520 |
| ACCCCTTGTT CTGGATTCGG ATTTTCTCAC ATTTGCTTCG TGAGATGGGG GCTTAACCCA | 2580 |
| CACAGGTCTC CGTGCGTGAA CCAGGTCTGC TTAGGGGACC TGCGTGCAGG TGAGGAGAGA | 2640 |
| AGGGGACACT CGAGTCCAGG CTGGTATCTC AGGGCAGCTG ATGAGGGGTC AGCAGGAACA | 2700 |
| CTGGCCCATT GCCCCTGGCA CTCCTTGCAG AGGCCACCCA CGATCTTCTT TGGGCTTCCA | 2760 |
| TTTCCACCAG GGACTAAAAT CTGCTGTAGC TAGTGAGAGC AGCGTGTTCC TTTTGTTGTT | 2820 |
| CACTGCTCAG CTGATGGGAG TGATTCCCTG AGACCCAGTA TGAAAGAGCA GTGGCTGCAG | 2880 |
| GAGAGGCCTT CCCGGGGCCC CCCATCAGCG ATGTGTCTTC AGAGACAATC CATTAAAGCA | 2940 |
| GCCAGGAAGG ACAGGCTTTC CCCTGTATAT CATAGGAAAC TCAGGGACAT TTCAAGTTGC | 3000 |
| TGAGAGTTTT GTTATAGTTG TTTTCTAACC CAGCCCTCCA CTGCCAAAGG CCAAAAGCTC | 3060 |
| AGACAGTTGG CAGACGTCCA GTTAGCTCAT CTCACTCACT CTGATTCTCC TGTGCCACAG | 3120 |
| GAAAAGAGGG CCTGGAAAGC GCAGTGCATG CTGGGTGCAT GAAGGGCAGC CTGGGGGACA | 3180 |
| GACTGTTGTG GGAACGTCCC ACTGTCCTGG CCTGGAGCTA GGCCTTGCTG TTCCTCTTCT | 3240 |
| CTGTGAGCCT AGTGGGGCTG CTGCGGTTCT CTTGCAGTTT CTGGTGGCAT CTCAGGGGAA | 3300 |
| CACAAAAGCT ATGTCTATTC CCCAATATAG GACTTTTATG GGCTCGGCAG TTAGCTGCCA | 3360 |
| TGTAGAAGGC TCCTAAGCAG TGGGCATGGT GAGGTTTCAT CTGATTGAGA AGGGGGAATC | 3420 |
| CTGTGTGGAA TGTTGAACTT TCGCCATGGT CTCCATCGTT CTGGGCGTAA ATTCCCTGGG | 3480 |
| ATCAAGTAGG AAAATGGGCA GAACTGCTTA GGGGAATGAA ATTGCCATTT TTCGGGTGAA | 3540 |
| ACGCCACACC TCCAGGGTCT TAAGAGTCAG GCTCCGGCTG TAGTAGCTCT GATGAAATAG | 3600 |
| GCTATCCACT CGGGATGGCT TACTTTTTAA AAGGGTAGGG GGAGGGGCTG GGGAAGATCT | 3660 |
| GTCCTGCACC ATCTGCCTAA TTCCTTCCTC ACAGTCTGTA GCCATCTGAT ATCCTAGGGG | 3720 |
| GAAAAGGAAG GCCAGGGGTT CACATAGGGC CCCAGCGAGT TTCCCAGGAG TTAGAGGGAT | 3780 |
| GCGAGGCTAA CAAGTTCCAA AAACATCTGC CCCGATGCTC TAGTGTTTGG AGGTGGGCAG | 3840 |
| GATGGAGAAC AGTGCCTGTT TGGGGGAAAA CAGGAAATCT TGTTAGGCTT GAGTGAGGTG | 3900 |
| TTTGCTTCCT TCTTGCCCAG CGCTGGGTTC TCTCCACCCA GTAGGTTTTC TGTTGTGGTC | 3960 |
| CCGTGGGAGA GGCCAGACTG GATTATTCCT CCTTTGCTGA TCCTGGGTCA CACTTCACCA | 4020 |
| GCCAGGGCTT TTGACGGAGA CAGCAAATAG GCCTCTGCAA ATCAATCAAA GGCTGCAACC | 4080 |
| CTATGGCCTC TTGGAGACAG ATGATGACTG GCAAGGACTA GAGAGCAGGA GTGCCTGGCC | 4140 |
| AGGTCGGTCC TGACTCTCCT GACTCTCCAT CGCTCTGTCC AAGGAGAACC CGGAGAGGCT | 4200 |
| CTGGGCTGAT TCAGAGGTTA CTGCTTTATA TTCGTCCAAA CTGTGTTAGT CTAGGCTTAG | 4260 |
| GACAGCTTCA GAATCTGACA CCTTGCCTTG CTCTTGCCAC CAGGACACCT ATGTCAACAG | 4320 |
| GCCAAACAGC CATGCATCTA TAAAGGTCAT CATCTTCTGC CACCTTTACT GGGTTCTAAA | 4380 |
| TGCTCTCTGA TAATTCAGAG AGCATTGGGT CTGGGAAGAG GTAAGAGGAA CACTAGAAGC | 4440 |
| TCAGCATGAC TTAAACAGGT TGTAGCAAAG ACAGTTTATC ATCAACTCTT TCAGTGGTAA | 4500 |
| ACTGTGGTTT CCCCAAGCTG CACAGGAGGC CAGAAACCAC AAGTATGATG ACTAGGAAGC | 4560 |
| CTACTGTCAT GAGAGTGGGG AGACAGGCAG CAAAGCTTAT GAAGGAGGTA CAGAATATTC | 4620 |
| TTTGCGTTGT AAGACAGAAT ACGGGTTTAA TCTAGTCTAG GCRCCAGATT TTTTTCCCGC | 4680 |
| TTGATAAGGA AAGCTAGCAG AAAGTTTATT TAAACCACTT CTTGAGCTTT ATCTTTTTTG | 4740 |
| ACAATATACT GGAGAAACTT TGAAGAACAA GTTCAAACTG ATACATATAC ACATATTTTT | 4800 |
| TTGATAATGT AAATACAGTG ACCATGTTAA CCTACCCTGC ACTGCTTTAA GTGAACATAC | 4860 |
| TTTGAAAAAG CATTATGTTA GCTGAGTGAT GGCCAAGTTT TTTCTCTGGA CAGGAATGTA | 4920 |
| AATGTCTTAC TGGAAATGAC AAGTTTTTGC TTGATTTTTT TTTTTAAACA AAAAATGAAA | 4980 |
| TATAACAAGA CAAACTTATG ATAAAGTATT TGTCTTGTAG ATCAGGTGTT TTGTTTTGTT | 5040 |
| TTTTTAATTT TAAAATGCAA CCCTGCCCCC TCCCCAGCAA AGTCACAGCT CCATTTCAGT | 5100 |
| AAAGGTTGGA GTCAATATGC TCTGGTTGGC AGGCAACCCT GTAGTCATGG AGAAAGGTAT | 5160 |
| TTCAAGATCT AGTCCAATCT TTTTCTAGAG AAAAAGATAA TCTGAAGCTC ACAAAGATGA | 5220 |
| AGTGACTTCC TCAAAATCAC ATGGTTCAGG ACAGAAACAA GATTAAAACC TGGATCCACA | 5280 |
| GACTGTGCGC CTCAGAAGGA ATAATCGGTA AATTAAGAAT TGCTACTCGA AGGTGCCAGA | 5340 |
| ATGACACAAA GGACAGAATT CCTTTCCCAG TTGTTACCCT AGCAAGGCTA GGGAGGGCAT | 5400 |
| GAACACAAAC ATAAGAACTG GTCTTCTCAC ACTTTCTCTG AATCATTTAG GTTTAAGATG | 5460 |
| TAAGTGAACA ATTCTTTCTT TCTGCCAAGA AACAAAGTTT TGGATGAGCT TTTATATATG | 5520 |
| GAACTTACTC CAACAGGACT GAGGGACCAA GGAAACATGA TGGGGGAGGC AAGAGAGGGC | 5580 |
| AAAGAGTAAA ACTGTAGCAT AGCTTTTGTC ACGGTCACTA GCTGATCCCT CAGGTCTGCT | 5640 |
| GCAAACACAG CATGGAGGAC ACAGATGACT CTTTGGTGTT GGTCTTTTTG TCTGCAGTGA | 5700 |
| ATGTTCAACA GTTTGCCCAG GAACTGGGGG ATCATATATG TCTTAGTGGA CAGGGGTCTG | 5760 |
| AAGTACACTG GAATTTACTG AGAAACTTGT TTGTAAAAAC TATAGTTAAT AATTATTGCA | 5820 |
| TTTTCTTACA AAAATATATT TTGGAAAATT GTATACTGTC AATTAAAGT | |

AAB8 DNA sequence
Gene name: EGF-containing fibulin-like extracellular matrix protein 1
Unigene number: Hs.76224
Probeset Accession #: U03877
Nucleic Acid Accession #: NM_004105 Transcript variant 1
Coding sequence: 150-1631 (predicted start/stop codons underlined)

| | |
|---|---|
| CTAGTATTCT ACTAGAACTG GAAGATTGCT CTCCGAGTTT TTTTTTTGTT ATTTTGTTAA | 60 |
| AAAATAAAAA GCTTGAGCAG CAATTCATAT TACTGTCACA GGTATTTTTG CTGTGCTGTG | 120 |
| CAAGGTAACT CTGCTAGCTA AGATTCACAA TGTTGAAAGC CCTTTTCCTA ACTATGCTGA | 180 |
| CTCTGGCGCT GGTCAAGTCA CAGGACACCG AAGAAACCAT CACGTACACG CAATGCACTG | 240 |
| ACGGATATGA GTGGGATCCT GTGAGACAGC AATGCAAAGA TATTGATGAA TGTGACATTG | 300 |
| TCCCAGACGC TTGTAAAGGT GGAATGAAGT GTGTCAACCA CTATGGAGGA TACCTCTGCC | 360 |
| TTCCGAAAAC AGCCCAGATT ATTGTCAATA ATGAACAGCC TCAGCAGGAA ACACAACCAG | 420 |
| CAGAAGGAAC CTCAGGGGGA ACCACCGGGG TTGTAGCTGC CAGCAGCATG GCAACCAGTG | 480 |
| GAGTGTTGCC CGGGGGTGGT TTTGTGGCCA GTGCTGCTGC AGTCGCAGGC CCTGAAATGC | 540 |
| AGACTGGCCG AAATAACTTT GTCATCCGGC GGAACCCAGC TGACCCTCAG CGCATTCCCT | 600 |
| CCAACCCTTC CCACCGTATC CAGTGTGCAG CAGGCTACGA GCAAAGTGAA CACAACGTGT | 660 |
| GCCAAGACAT AGACGAGTGC ACTGCAGGGA CGCACAACTG TAGAGCAGAC CAAGTGTGCA | 720 |
| TCAATTTACG GGGATCCTTT GCATGTCAGT GCCCTCCTGG ATATCAGAAG CGAGGGGAGC | 780 |
| AGTGCGTAGA CATAGATGAA TGTACCATCC CTCCATATTG CCACCAAAGA TGCGTGAATA | 840 |
| CACCAGGCTC ATTTTATTGC CAGTGCAGTC CTGGGTTTCA ATTGGCAGCA AACAACTATA | 900 |
| CCTGCGTAGA TATAAATGAA TGTGATGCCA GCAATCAATG TGCTCAGCAG TGCTACAACA | 960 |
| TTCTTGGTTC ATTCATCTGT CAGTGCAATC AAGGATATGA GCTAAGCAGT GACAGGCTCA | 1020 |
| ACTGTGAAGA CATTGATGAA TGCAGAACCT CAAGCTACCT GTGTCAATAT CAATGTGTCA | 1080 |
| ATGAACCTGG GAAATTCTCA TGTATGTGCC CCCAGGGATA CCAAGTGGTG AGAAGTAGAA | 1140 |
| CATGTCAAGA TATAAATGAG TGTGAGACCA CAAATGAATG CCGGGAGGAT GAAATGTGTT | 1200 |
| GGAATTATCA TGGCGGCTTC CGTTGTTATC CACGAAATCC TTGTCAAGAT CCCTACATTC | 1260 |
| TAACACCAGA GAACCGATGT GTTTGCCCAG TCTCAAATGC CATGTGCCGA GAACTGCCCC | 1320 |
| AGTCAATAGT CTACAAATAC ATGAGCATCC GATCTGATAG GTCTGTGCCA TCAGACATCT | 1380 |
| TCCAGATACA GGCCACAACT ATTTATGCCA ACACCATCAA TACTTTTCGG ATTAAATCTG | 1440 |
| GAAATGAAAA TGGAGAGTTC TACCTACGAC AAACAAGTCC TGTAAGTGCA ATGCTTGTGC | 1500 |
| TCGTGAAGTC ATTATCAGGA CCAAGAGAAC ATATCGTGGA CCTGGAGATG CTGACAGTCA | 1560 |
| GCAGTATAGG GACCTTCCGC ACAAGCTCTG TGTTAAGATT GACAATAATA GTGGGGCCAT | 1620 |
| TTTCATTTTA GTCTTTTCTA AGAGTCAACC ACAGGCATTT AAGTCAGCCA AAGAATATTG | 1680 |
| TTACCTTAAA GCACTATTTT ATTTATAGAT ATATCTAGTG CATCTACATC TCTATACTGT | 1740 |
| ACACTCACCC ATAACAAACA ATTACACCAT GGTATAAAGT GGGCATTTAA TATGTAAAGA | 1800 |
| TTCAAAGTTT GTCTTTATTA CTATATGTAA ATTAGACATT AATCCACTAA ACTGGTCTTC | 1860 |
| TTCAAGAGAG CTAAGTATAC ACTATCTGGT GAAACTTGGA TTCTTTCCTA TAAAAGTGGG | 1920 |
| ACCAAGCAAT GATGATCTTC TGTGGTGCTT AAGGAAACTT ACTAGAGCTC CACTAACAGT | 1980 |
| CTCATAAGGA GGCAGCCATC ATAACCATTG AATAGCATGC AAGGGTAAGA ATGAGTTTTT | 2040 |
| AACTGCTTTG TAAGAAAATG GAAAAGGTCA ATAAAGATAT ATTTCTTTAG AAAATGGGGA | 2100 |
| TCTGCCATAT TTGTGTTGGT TTTTATTTTC ATATCCAGCC TAAAGGTGGT TGTTTATTAT | 2160 |
| ATAGTAATAA ATCATTGCTG TACAACATGC TGGTTTCTGT AGGGTATTTT TAATTTTGTC | 2220 |
| AGAAATTTTA GATTGTGAAT ATTTTGTAAA AAACAGTAAG CAAAATTTTC CAGAATTCCC | 2280 |
| AAAATGAACC AGATACCCCC TAGAAAATTA TACTATTGAG AAATCTATGG GGAGGATATG | 2340 |
| AGAAAATAAA TTCCTTCTAA ACCACATTGG AACTGACCTG AAGAAGCAAA CTCGGAAAAT | 2400 |
| ATAATAACAT CCCTGAATTC AGGCATTCAC AAGATGCAGA ACAAAATGGA TAAAAGGTAT | 2460 |
| TTCACTGGAG AAGTTTTAAT TTCTAAGTAA AATTTAAATC CTAACACTTC ACTAATTTAT | 2520 |
| AACTAAAATT TCTCATCTTC GTACTTGATG CTCACAGAGG AAGAAAATGA TGATGGTTTT | 2580 |
| TATTCCTGGC ATCCAGAGTG ACAGTGAACT TAAGCAAATT ACCCTCCTAC CCAATTCTAT | 2640 |
| GGAATATTTT ATACGTCTCC TTGTTTAAAA TCTGACTGCT TTACTTTGAT GTATCATATT | 2700 |
| TTTAAATAAA AATAAATATT CCTTTAGAAG ATCACTCTAA AA | |

AAB9 DNA sequence
Gene name: Melanoma adhesion molecule, MUC 18 glycoprotein
Unigene number: Hs.211579
Probeset Accession #: M28882
Nucleic Acid Accession #: NM_006500 cluster
Coding sequence: 27-1967 (predicted start/stop codons underlined)

| | |
|---|---|
| ACTTGCGTCT CGCCCTCCGG CCAAGCATGG GGCTTCCCAG GCTGGTCTGC GCCTTCTTGC | 60 |
| TCGCCGCCTG CTGCTGCTGT CCTCGCGTCG CGGGTGTGCC CGGAGAGGCT GAGCAGCCTG | 120 |
| CGCCTGAGCT GGTGGAGGTG GAAGTGGGCA GCACAGCCCT TCTGAAGTGC GGCCTCTCCC | 180 |
| AGTCCCAAGG CAACCTCAGC CATGTCGACT GGTTTTCTGT CCACAAGGAG AAGCGGACGC | 240 |
| TCATCTTCCG TGTGCGCCAG GGCCAGGGCC AGAGCGAACC TGGGGAGTAC GAGCAGCGGC | 300 |
| TCAGCCTCCA GGACAGAGGG GCTACTCTGG CCCTGACTCA AGTCACCCCC CAAGACGAGC | 360 |
| GCATCTTCTT GTGCCAGGGC AAGCGCCCTC GGTCCCAGGA GTACCGCATC CAGCTCCGCG | 420 |
| TCTACAAAGC TCCGGAGGAG CCAAACATCC AGGTCAACCC CCTGGGCATC CCTGTGAACA | 480 |
| GTAAGGAGCC TGAGGAGGTC GCTACCTGTG TAGGGAGGAA CGGGTACCCC ATTCCTCAAG | 540 |
| TCATCTGGTA CAAGAATGGC CGGCCTCTGA AGGAGGAGAA GAACCGGGTC CACATTCAGT | 600 |
| CGTCCCAGAC TGTGGAGTCG AGTGGTTTGT ACACCTTGCA GAGTATTCTG AAGGCACAGC | 660 |
| TGGTTAAAGA AGACAAAGAT GCCCAGTTTT ACTGTGAGCT CAACTACCGG CTGCCCAGTG | 720 |
| GGAACCACAT GAAGGAGTCC AGGGAAGTCA CCGTCCCTGT TTTCTACCCG ACAGAAAAAG | 780 |
| TGTGGCTGGA AGTGGAGCCC GTGGGAATGC TGAAGGAAGG GGACCGCGTG GAAATCAGGT | 840 |
| GTTTGGCTGA TGGCAACCCT CCACCACACT TCAGCATCAG CAAGCAGAAC CCCAGCACCA | 900 |
| GGGAGGCAGA GGAAGAGACA ACCAACGACA ACGGGGTCCT GGTGCTGGAG CCTGCCCGGA | 960 |
| AGGAACACAG TGGGCGCTAT GAATGTCAGG CCTGGAACTT GGACACCATG ATATCGCTGC | 1020 |
| TGAGTGAACC ACAGGAACTA CTGGTGAACT ATGTGTCTGA CGTCCGAGTG AGTCCCGCAG | 1080 |
| CCCCTGAGAG ACAGGAAGGC AGCAGCCTCA CCCTGACCTG TGAGGCAGAG AGTAGCCAGG | 1140 |
| ACCTCGAGTT CCAGTGGCTG AGAGAAGAGA CAGACCAGGT GCTGGAAAGG GGGCCTGTGC | 1200 |
| TTCAGTTGCA TGACCTGAAA CGGGAGGCAG GAGGCGGCTA TCGCTGCGTG GCGTCTGTGC | 1260 |
| CCAGCATACC CGGCCTGAAC CGCACACAGC TGGTCAAGCT GGCCATTTTT GGCCCCCCTT | 1320 |
| GGATGGCATT CAAGGAGAGG AAGGTGTGGG TGAAAGAGAA TATGGTGTTG AATCTGTCTT | 1380 |
| GTGAAGCGTC AGGGCACCCC CGGCCCACCA TCTCCTGGAA CGTCAACGGC ACGGCAAGTG | 1440 |
| AACAAGACCA AGATCCACAG CGAGTCCTGA GCACCCTGAA TGTCCTCGTG ACCCCGGAGC | 1500 |
| TGTTGGAGAC AGGTGTTGAA TGCACGGCCT CCAACGACCT GGGCAAAAAC ACCAGCATCC | 1560 |
| TCTTCCTGGA GCTGGTCAAT TTAACCACCC TCACACCAGA CTCCAACACA ACCACTGGCC | 1620 |
| TCAGCACTTC CACTGCCAGT CCTCATACCA GAGCCAACAG CACCTCCACA GAGAGAAAGC | 1680 |
| TGCCGGAGCC GGAGAGCCGG GGCGTGGTCA TCGTGGCTGT GATTGTGTGC ATCCTGGTCC | 1740 |
| TGGCGGTGCT GGGCGCTGTC CTCTATTTCC TCTATAAGAA GGGCAAGCTG CCGTGCAGGC | 1800 |
| GCTCAGGGAA GCAGGAGATC ACGCTGCCCC CGTCTCGTAA GACCGAACTT GTAGTTGAAG | 1860 |
| TTAAGTCAGA TAAGCTCCCA GAAGAGATGG GCCTCCTGCA GGGCAGCAGC GGTGACAAGA | 1920 |
| GGGCTCCGGG AGACCAGGGA GAGAAATACA TCGATCTGAG GCATTAGCCC CGAATCACTT | 1980 |
| CAGCTCCCTT CCCTGCCTGG ACCATTCCCA GCTCCCTGCT CACTCTTCTC TCAGCCAAAG | 2040 |
| CCTCCAAAGG GACTAGAGAG AAGCCTCCTG CTCCCCTCAC CTGCACACCC CCTTTCAGAG | 2100 |
| GGCCACTGGG TTAGGACCTG AGGACCTCAC TTGGCCCTGC AAGCCGCTTT TCAGGGACCA | 2160 |
| GTCCACCACC ATCTCCTCCA CGTTGAGTGA AGCTCATCCC AAGCAAGGAG CCCCAGTCTC | 2220 |
| CCGAGCGGGT AGGAGAGTTT CTTGCAGAAC GTGTTTTTTC TTTACACACA TTATGGCTGT | 2280 |
| AAATACCTGG CTCCTGCCAG CAGCTGAGCT GGGTAGCCTC TCTGAGCTGG TTTCCTGCCC | 2340 |
| CAAAGGCTGG CTTCCACCAT CCAGGTGCAC CACTGAAGTG AGGACACACC GGAGCCAGGC | 2400 |
| GCCTGCTCAT GTTGAAGTGC GCTGTTCACA CCCGCTCCGG AGAGCACCCC AGCGGCATCC | 2460 |
| AGAAGCAGCT GCAGTGTTGC TGCCACCACC CTUCTGCTCG CCTCTTCAAA GTCTCCTGTG | 2520 |
| ACATTTTTTC TTTGGTCAGA AGCCAGGAAC TGGTGTCATT CCTTAAAAGA TACGTGCCGG | 2580 |
| GGCCAGGTGT GGTGGCTCAC GCCTGTAATC CCAGCACTTT GGGAGGCCGA GGCGGGCGGA | 2640 |
| TCACAAAGTC AGGACGAGAC CATCCTGGCT AACACGGTGA AACCCTGTCT CTACTAAAAA | 2700 |
| TACAAAAAAA AATTAGCTAG GCGTAGTGGT TGGCACCTAT AGTCCCAGCT ACTCGGAAGG | 2760 |
| CTGAAGCAGG AGAATGGTAT GAATCCAGGA GGTGGAGCTT GCAGTGAGCC GAGACCGTGC | 2820 |
| CACTGCACTC CAGCCTGGGC AACACAGCGA GACTCCGTCT CGAGGAAAAA AAAAGAAAAG | 2880 |
| ACGCGTACCT GCGGTGAGGA AGCTGGGCGC TGTTTTCGAG TTCAGGTGAA TTAGCCTCAA | 2940 |
| TCCCCGTGTT CACTTGCTCC CATAGCCCTC TTGATGGATC ACGTAAAACT GAAAGGCAGC | 3000 |
| GGGGAGCAGA CAAAGATGAG GTCTACACTG TCCTTCATGG GGATTAAAGC TATGGTTATA | 3060 |
| TTAGCACCAA ACTTCTACAA ACCAAGCTCA GGGCCCCAAC CCTAGAAGGG CCCAAATGAG | 3120 |
| AGAATGGTAC TTAGGGATGG AAAACGGGGC CTGGCTAGAG CTTCGGGTGT GTGTGTCTGT | 3280 |
| CTGTGTGTAT GCATACATAT GTGTGTATAT ATGGTTTTGT CAGGTGTGTA AATTTGCAAA | 3240 |
| TTGTTTCCTT TATATATGTA TGTATATATA TATATGAAAA TATATATATA TATGAAAAAT | 3300 |
| AAAGCTTAAT TGTCCCAGAA AATCATACAT TGCTTTTTTA TTCTACATGG GTACCACAGG | 3360 |
| AACCTGGGGG CCTGTGAAAC TACAACCAAA AGGCACACAA AACCGTTTCC AGTTGGCAGC | 3420 |
| AGAGATCAGG GGTTACCTCT GCTTCTGAGC AAATGGCTCA AGCTCTACCA GAGCAGACAG | 3480 |
| CTACCCTACT TTTCAGCAGC AAAACGTCCC GTATGACGCA GCACGAAGGG CCTGGCAGGC | 3540 |
| TGTTAGCAGG AGCTATGTCC CTTCCTATCG TTTCCGTCCA CTT | |

AAC1 DNA sequence
Gene name: Matrix metalloproteinase 1 (interstitial collagenase)
Unigene number: Hs.83169
Probeset Accession #: X54925
Nucleic Acid Accession #: NM_002421 cluster
Coding sequence: 69-1478 (predicted start/stop codons underlined)

| | |
|---|---|
| ATATTGGAGT AGCAAGAGGC TGGGAAGCCA TCACTTACCT TGCACTGAGA AAGAAGACAA | 60 |
| AGGCCAGTAT GCACAGCTTT CCTCCACTGC TGCTGCTGCT GTTCTGGGGT GTGGTGTCTC | 120 |
| ACAGCTTCCC AGCGACTCTA GAAACACAAG AGCAAGATGT GGACTTAGTC CAGAAATACC | 180 |
| TGGAAAAATA CTACAACCTG AAGAATGATG GGAGGCAAGT TGAAAAGCGG AGAAATAGTG | 240 |
| GCCCAGTGGT TGAAAAATTG AAGCAAATGC AGGAATTCTT TGGGCTGAAA GTGACTGGGA | 300 |
| AACCAGATGC TGAAACCCTG AAGGTGATGA AGCAGCCCAG ATGTGGAGTG CCTGATGTGG | 360 |
| CTCAGTTTGT CCTCACTGAG GGGAACCCTC GCTGGGAGCA AACACATCTG ACCTACAGGA | 420 |
| TTGAAAATTA CACGCCAGAT TTGCCAAGAG CAGATGTGGA CCATGCCATT GAGAAAGCCT | 480 |
| TCCAACTCTG GAGTAATGTC ACACCTCTGA CATTCACCAA GGTCTCTGAG GGTCAAGCAG | 540 |
| ACATCATGAT ATCTTTTGTC AGGGGAGATC ATCGGGACAA CTCTCCTTTT GATGGACCTG | 600 |
| GAGGAAATCT TGCTCATGCT TTTCAACCAG GCCCAGGTAT TGGAGGGGAT GCTCATTTTG | 660 |
| ATGAAGATGA AAGGTGGACC AACAATTTCA GAGAGTACAA CTTACATCGT GTTGCGGCTC | 720 |
| ATGAACTCGG CCATTCTCTT GGACTCTCCC ATTCTACTGA TATCGGGGCT TTGATGTACC | 780 |
| CTAGCTACAC CTTCAGTGGT GATGTTCAGC TAGCTCAGGA TGACATTGAT GGCATCCAAG | 840 |
| CCATATATGG ACGTTCCCAA AATCCTGTCC AGCCCATCGG CCCACAAACC CCAAAAGCAT | 900 |
| GTGACAGTAA GCTAACCTTT GATGCTATAA CTACGATTCG GGGAGAAGTG ATGTTCTTTA | 960 |
| AAGACAGATT CTACATGCGC ACAAATCCCT TCTACCCGGA AGTTGAGCTC AATTTCATTT | 1020 |
| CTGTTTTCTG GCCACAACTG CCAAATGGGC TTGAAGCTGC TTACGAATTT GCCGACAGAG | 1080 |
| ATGAAGTCCG GTTTTTCAAA GGGAATAAGT ACTGGGCTGT TCAGGGACAG AATGTGCTAC | 1140 |
| ACGGATACCC CAAGGACATC TACAGCTCCT TTGGCTTCCC TAGAACTGTG AAGCATATCG | 1200 |
| ATGCTGCTCT TTCTGAGGAA AACACTGGAA AAACCTACTT CTTTGTTGCT AACAAATACT | 1260 |
| GGAGGTATGA TGAATATAAA CGATCTATGG ATCCAGGTTA TCCCAAAATG ATAGCACATG | 1320 |
| ACTTTCCTGG AATTGGCCAC AAAGTTGATG CAGTTTTCAT GAAAGATGGA TTTTTCTATT | 1380 |
| TCTTTCATGG AACAAGACAA TACAAATTTG ATCCTAAAAC GAAGAGAATT TTGACTCTCC | 1440 |
| AGAAAGCTAA TAGCTGGTTC AACTGCAGGA AAAATTGAAC ATTACTAATT TGAATGGAAA | 1500 |
| ACACATGGTG TGAGTCCAAA GAAGGTGTTT TCCTGAAGAA CTGTCTATTT TCTCAGTCAT | 1560 |
| TTTTAACCTC TAGAGTCACT GATACACAGA ATATAATCTT ATTTATACCT CAGTTTGCAT | 1620 |
| ATTTTTTTAC TATTTAGAAT GTAGCCCTTT TTGTACTGAT ATAATTTAGT TCCACAAATG | 1680 |
| GTGGGTACAA AAAGTCAAGT TTGTGGCTTA TGGATTCATA TAGGCCAGAG TTGCAAAGAT | 1740 |
| CTTTTCCAGA GTATGCAACT CTGACGTTGA TCCCAGAGAG CAGCTTCAGT GACAAACATA | 1800 |
| TCCTTTCAAG ACAGAAAGAG ACAGGAGACA TGAGTCTTTG CCGGAGGAAA AGCAGCTCAA | 1860 |
| GAACACATGT GCAGTCACTG GTGTCACCCT GGATAGGCAA GGGATAACTC TTCTAACACA | 1920 |
| AAATAAGTGT TTTATGTTTG GAATAAAGTC AACCTTGTTT CTACTGTTTT | |

AAC3 DNA sequence
Gene name: Branched chain aminotransferase 1, cytosolic
Unigene number: Hs.157205
Probeset Accession #: AA423987
Nucleic Acid Accession #: NM_005504 cluster
Coding sequence: 1-1155 (predicted start/stop codons underlined)

| | |
|---|---|
| ATGGATTGCA GTAACGGATC GGCAGAGTGT ACCGGAGAAG GAGGATCAAA AGAGGTGGTG | 60 |
| GGGACTTTTA AGGCTAAAGA CCTAATAGTC ACACCAGCTA CCATTTTAAA GGAAAAACCA | 120 |
| GACCCCAATA ATCTGGTTTT TGGAACTGTG TTCACGGATC ATATGCTGAC GGTGGAGTGG | 180 |
| TCCTCAGAGT TTGGATGGGA GAAACCTCAT ATCAAGCCTC TTCAGAACCT GTCATTGCAC | 240 |
| CCTGGCTCAT CAGCTTTGCA CTATGCAGTG GAATTATTTG AAGGATTGAA GGCATTTCGA | 300 |
| GGAGTAGATA ATAAAATTCG ACTGTTTCAG CCAAACCTCA ACATGGATAG AATGTATCGC | 360 |
| TCTGCTGTGA GGGCAACTCT GCCGGTATTT GACAAAGAAG AGCTCTTAGA GTGTATTCAA | 420 |
| CAGCTTGTGA AATTGGATCA AGAATGGGTC CCATATTCAA CATCTGCTAG TCTGTATATT | 480 |
| CGTCCTGCAT TCATTGGAAC TGAGCCTTCT CTTGGAGTCA AGAAGCCTAC CAAAGCCCTG | 540 |
| CTCTTTGTAC TCTTGAGCCC AGTGGGACCT TATTTTTCAA GTGGAACCTT TAATCCAGTG | 600 |
| TCCCTGTGGG CCAATCCCAA GTATGTAAGA GCCTGGAAAG GTGGAACTGG GGACTGCAAG | 660 |
| ATGGGAGGGA ATTACGGCTC ATCTCTTTTT GCCCAATGTG AAGACGTAGA TAATGGGTGT | 720 |
| CAGCAGGTCC TGTGGCTCTA TGGCAGAGAC CATCAGATCA CTGAAGTGGG AACTATGAAT | 780 |
| CTTTTTCTTT ACTGGATAAA TGAAGATGGA GAAGAAGAAC TGGCAACTCC TCCACTAGAT | 840 |
| GGCATCATTC TTCCAGGAGT GACAAGGCGG TGCATTCTGG ACCTGGCACA TCAGTGGGGT | 900 |
| GAATTTAAGG TGTCAGAGAG ATACCTCACC ATGGATGACT TGACAACAGC CCTGGAGGGG | 960 |
| AACAGAGTGA GAGAGATGTT TAGCTCTGGT ACAGCCTGTG TTGTTTGCCC AGTTTCTGAT | 1020 |
| ATACTGTACA AAGGCGAGAC AATACACATT CCAACTATGG AGAATGGTCC TAAGCTGGCA | 1080 |
| AGCCGCATCT TGAGCAAATT AACTGATATC CAGTATGGAA GAGAAGAGAG CGACTGGACA | 1140 |
| ATTGTGCTAT CCTGA | |

ACG4 DNA sequence:
Gene name: Pentaxin-related gene, rapidly induced by IL-1 beta
Unigene number: Hs.2050
Probeset Accession #: M31166
Nucleic Acid Accession #: NM_002852 cluster
Coding sequence: 68-1213 (predicted start/stop codons underlined)

| | |
|---|---|
| CTCAAACTCA GCTCACTTGA GAGTCTCCTC CCGCCAGCTG TGGAAAGAAC TTTGCGTCTC | 60 |
| TCCAGCAATG CATCTCCTTG CGATTCTGTT TTGTGCTCTC TGGTCTGCAG TGTTGGCCGA | 120 |
| GAACTCGGAT GATTATGATC TCATGTATGT GAATTTGGAC AACGAAATAG ACAATGGACT | 180 |
| CCATCCCACT GAGGACCCCA CGCCGTGCGA CTGCGGTCAG GAGCACTCGG AATGGGACAA | 240 |
| GCTCTTCATC ATGCTGGAGA ACTCGCAGAT GAGAGAGCGC ATGCTGCTGC AAGCCACGGA | 300 |
| CGACGTCCTG CGGGGCGAGC TGCAGAGGCT GCGGGAGGAG CTGGGCCGGC TCGCGGAAAG | 360 |
| CCTGGCGAGG CCGTGCGCGC CGGGGGCTCC CGCAGAGGCC AGGCTGACCA GTGCTCTGGA | 420 |
| CGAGCTGCTG CAGGCGACCC GCGACGCGGG CCGCAGGCTG GCGCGTATGG AGGGCGCGGA | 480 |
| GGCGCAGCGC CCAGAGGAGG CGGGGCGCGC CCTGGCCGCG GTGCTAGAGG AGCTGCGGCA | 540 |
| GACGCGAGCC GACCTGCACG CGGTGCAGGG CTGGGCTGCC CGGAGCTGGC TGCCGGCAGG | 600 |
| TTGTGAAACA GCTATTTTAT TCCCAATGCG TTCCAAGAAG ATTTTTGGAA GCGTGCATCC | 660 |
| AGTGAGACCA ATGAGGCTTG AGTCTTTTAG TGCCTGCATT TGGGTCAAAG CCACAGATGT | 720 |
| ATTAAACAAA ACCATCCTGT TTTCCTATGG CACAAAGAGG AATCCATATG AAATCCAGCT | 780 |
| GTATCTCAGC TACCAATCCA TAGTGTTTGT GGTGGGTGGA GAGGAGAACA AACTGGTTGC | 840 |
| TGAAGCCATG GTTTCCCTGG GAAGGTGGAC CCACCTGTGC GGCACCTGGA ATTCAGAGGA | 900 |
| AGGGCTCACA TCCTTGTGGG TAAATGGTGA ACTGGCGGCT ACCACTGTTG AGATGGCCAC | 960 |
| AGGTCACATT GTTCCTGAGG GAGGAATCCT GCAGATTGGC CAAGAAAAGA ATGGCTGCTG | 1020 |
| TGTGGGTGGT GGCTTTGATG AAACATTAGC CTTCTCTGGG AGACTCACAG GCTTCAATAT | 1080 |
| CTGGGATAGT GTTCTTAGCA ATGAAGAGAT AAGAGAGACC GGAGGAGCAG AGTCTTGTCA | 1140 |
| CATCCGGGGG AATATTGTTG GGTGGGGAGT CACAGAGATC CAGCCACATG GAGGAGCTCA | 1200 |
| GTATGTTTCA TAAATGTTGT GAAACTCCAC TTGAAGCCAA AGAAAGAAAC TCACACTTAA | 1260 |
| AACACATGCC AGTTGGGAAG GTCTGAAAAC TCAGTGCATA ATAGGAACAC TTGAGACTAA | 1320 |
| TGAAAGAGAG AGTTGAGACC AATCTTTATT TGTACTGGCC AAATACTGAA TAAACAGTTG | 1380 |
| AAGGAAAGAC ATTGGAAAAA GCTTTTGAGG ATAATGTTAC TAGACTTTAT GCCATGGTGC | 1440 |
| TTTCAGTTTA ATGCTGTGTC TCTGTCAGAT AAACTCTCAA ATAATTAAAA AGGACTGTAT | 1500 |
| TGTTGAACAG AGGGACAATT GTTTTACTTT TCTTTGGTTA ATTTTGTTTT GGCCAGAGAT | 1560 |
| GAATTTTACA TTGGAAGAAT AACAAAATAA GATTTGTTGT CCATTGTTCA TTGTTATTGG | 1620 |
| TATGTACCTT ATTACAAAAA AAATGATGAA AACATATTTA TACTACAAGG TGACTTAACA | 1680 |
| ACTATAAATG TAGTTTATGT GTTATAATCG AATGTCACGT TTTTGAGAAG ATAGTCATAT | 1740 |
| AAGTTATATT GCAAAAGGGA TTTGTATTAA TTTAAGACTA TTTTTGTAAA GCTCTACTGT | 1800 |
| AAATAAAATA TTTTATAAAA CTAAAAAAAA AAAAAAA | |

ACK5 DNA sequence
Gene name: Von Willebrand factor; Coagulation factor VIII
Unigene number: Hs.110802
Probeset Accession #: M10321
Nucleic Acid Accession #: NM_000552
Coding sequence: 311-8752 (predicted start/stop codons underlined)

| | |
|---|---|
| AGCTCACAGC TATTGTGGTG GGAAAGGGAG GGTGGTTGGT GGATGTCACA GCTTGGGCTT | 60 |
| TATCTCCCCC AGCAGTGGGG ACTCCACAGC CCCTGGGCTA CATAACAGCA AGACAGTCCG | 120 |
| GAGCTGTAGC AGACCTGATT GAGCCTTTGC AGCAGCTGAG AGCATGGCCT AGGGTGGGCG | 180 |
| GCACCATTGT CCAGCAGCTG AGTTTCCCAG GGACCTTGGA GATAGCCGCA GCCCTCATTT | 240 |
| GCAGGGGAAG GCACCATTGT CCAGCAGCTG AGTTTCCCAG GGACCTTGGA GATAGCCGCA | 300 |
| GCCCTCATTT ATGATTCCTG CCAGATTTGC CGGGGTGCTG CTTGCTCTGG CCCTCATTTT | 360 |
| GCCAGGGACC CTTTGTGCAG AAGGAACTCG CGGCAGGTCA TCCACGGCCC GATGCAGCCT | 420 |
| TTTCGGAAGT GACTTCGTCA ACACCTTTGA TGGGAGCATG TACAGCTTTG CGGGATACTG | 480 |
| CAGTTACCTC CTGGCAGGGG GCTGCCAGAA ACGCTCCTTC TCGATTATTG GGGACTTCCA | 540 |
| GAATGGCAAG AGAGTGAGCC TCTCCGTGTA TCTTGGGGAA TTTTTTGACA TCCATTTGTT | 600 |
| TGTCAATGGT ACCGTGACAC AGGGGGACCA AAGAGTCTCC ATGCCCTATG CCTCCAAAGG | 660 |
| GCTGTATCTA GAAACTGAGG CTGGGTACTA CAAGCTGTCC GGTGAGGCCT ATGGCTTTGT | 720 |
| GGCCAGGATC GATGGCAGCG GCAACTTTCA AGTCCTGCTG TCAGACAGAT ACTTCAACAA | 780 |
| GACCTGCGGG CTGTGTGGCA ACTTTAACAT CTTTGCTGAA GATGACTTTA TGACCCAAGA | 840 |
| AGGGACCTTG ACCTCGGACC CTTATGACTT TGCCAACTCA TGGGCTCTGA GCAGTGGAGA | 900 |
| ACAGTGGTGT GAACGGGCAT CTCCTCCCAG CAGCTCATGC AACATCTCCT CTGGGGAAAT | 960 |
| GCAGAAGGGC CTGTGGGAGC AGTGCCAGCT TCTGAAGAGC ACCTCGGTGT TTGCCCGCTG | 1020 |
| CCACCCTCTG GTGGACCCCG AGCCTTTTGT GGCCCTGTGT GAGAAGACTT TGTGTGAGTG | 1080 |
| TGCTGGGGGG CTGGAGTGCG CCTGCCCTGC CCTCCTGGAG TACGCCCGGA CCTGTGCCCA | 1140 |
| GGAGGGAATG GTGCTGTACG GCTGGACCGA CCACAGCGCG TGCAGCCCAG TGTGCCCTGC | 1200 |
| TGGTATGGAG TATAGGCAGT GTGTGTCCCC TTGCGCCAGG ACCTGCCAGA GCCTGCACAT | 1260 |
| CAATGAAATG TGTCAGGAGC GATGCGTGGA TGGCTGCAGC TGCCCTGAGG GACAGCTCCT | 1320 |
| GGATGAAGGC CTCTGCGTGG AGAGCACCGA GTGTCCCTGC GTGCATTCCG GAAAGCGCTA | 1380 |
| CCCTCCCGGC ACCTCCCTCT CTCGAGACTG CAACACCTGC ATTTGCCGAA ACAGCCAGTG | 1440 |
| GATCTGCAGC AATGAAGAAT GTCCAGGGGA GTGCCTTGTC ACTGGTCAAT CCCACTTCAA | 1500 |
| GAGCTTTGAC AACAGATACT TCACCTTCAG TGGGATCTGC CAGTACCTGC TGGCCCGGGA | 1560 |
| TTGCCAGGAC CACTCCTTCT CCATTGTCAT TGAGACTGTC CAGTGTGCTG ATGACCGCGA | 1620 |
| CGCTGTGTGC ACCCGCTCCG TCACCGTCCG GCTGCCTGGC CTGCACAACA GCCTTGTGAA | 1680 |
| ACTGAAGCAT GGGGCAGGAG TTGCCATGGA TGGCCAGGAC ATCCAGCTCC CCCTCCTGAA | 1740 |
| AGGTGACCTC CGCATCCAGC ATACAGTGAC GGCCTCCGTG CGCCTCAGCT ACGGGGAGGA | 1800 |
| CCTGCAGATG GACTGGGATG GCCGCGGGAG GCTGCTGGTG AAGCTGTCCC CCGTCTACGC | 1860 |
| CGGGAAGACC TGCGGCCTGT GTGGGAATTA CAATGGCAAC CAGGGCGACG ACTTCCTTAC | 1920 |
| CCCCTCTGGG CTGGCAGAGC CCCGGGTGGA GGACTTCGGG AACGCCTGGA AGCTGCACGG | 1980 |
| GGACTGCCAG GACCTGCAGA AGCAGCACAG CGATCCCTGC GCCCTCAACC CGCGCATGAC | 2040 |
| CAGGTTCTCC GAGGAGGCGT GCGCGGTCCT GACGTCCCCC ACATTCGAGG CCTGCCATCG | 2100 |
| TGCCGTCAGC CCGCTGCCCT ACCTGCGGAA CTGCCGCTAC GACGTGTGCT CCTGCTCGGA | 2160 |
| CGGCCGCGAG TGCCTGTGCG GCGCCCTGGC CAGCTATGCC GCGGCCTGCG CGGGGAGAGG | 2220 |
| CGTGCGCGTC GCGTGGCGCG AGCCAGGCCG CTGTGAGCTG AACTGCCCGA AAGGCCAGGT | 2280 |
| GTACCTGCAG TGCGGGACCC CCTGCAACCT GACCTGCCGC TCTCTCTCTT ACCCGGATGA | 2340 |
| GGAATGCAAT GAGGCCTGCC TGGAGGGCTG CTTCTGCCCC CCAGGGCTCT ACATGGATGA | 2400 |
| GAGGGGGGAC TGCGTGCCCA AGGCCCAGTG CCCCTGTTAC TATGACGGTG AGATCTTCCA | 2460 |
| GCCAGAAGAC ATCTTCTCAG ACCATCACAC CATGTGCTAC TGTGAGGATG GCTTCATGCA | 2520 |
| CTGTACCATG AGTGGAGTCC CCGGAAGCTT GCTGCCTGAC GCTGTCCTCA GCAGTCCCCT | 2580 |
| GTCTCATCGC AGCAAAAGGA GCCTATCCTG TCGGCCCCCC ATGGTCAAGC TGGTGTGTCC | 2640 |
| CGCTGACAAC CTGCGGGCTG AAGGGCTCGA GTGTACCAAA ACGTGCCAGA ACTATGACCT | 2700 |
| GGAGTGCATG AGCATGGGCT GTGTCTCTGG CTGCCTCTGC CCCCCGGGCA TGGTCCGGCA | 2760 |
| TGAGAACAGA TGTGTGGCCC TGGAAAGGTG TCCCTGCTTC CATCAGGGCA AGGAGTATGC | 2820 |
| CCCTGGAGAA ACAGTGAAGA TTGGCTGCAA CACTTGTGTC TGTCGGGACC GGAAGTGGAA | 2880 |
| CTGCACAGAC CATGTGTGTG ATGCCACGTG CTCCACGATC GGCATGGCCC ACTACCTCAC | 2940 |
| CTTCGACGGG CTCAAATACC TGTTCCCCGG GGAGTGCCAG TACGTTCTGG TGCAGGATTA | 3000 |
| CTGCGGCAGT AACCCTGGGA CCTTTCGGAT CCTAGTGGGG AATAAGGGAT GCAGCCACCC | 3060 |
| CTCAGTGAAA TGCAAGAAAC GGGTCACCAT CCTGGTGGAG GGAGGAGAGA TTGAGCTGTT | 3120 |
| TGACGGGGAG GTGAATGTGA AGAGGCCCAT GAAGGATGAG ACTCACTTTG AGGTGGTGGA | 3180 |
| GTCTGGCCGG TACATCATTC TGCTGCTGGG CAAAGCCCTC TCCGTGGTCT GGGACCGCCA | 3240 |
| CCTGAGCATC TCCGTGGTCC TGAAGCAGAC ATACCAGGAG AAAGTGTGTG GCCTGTGTGG | 3300 |
| GAATTTTGAT GGCATCCAGA ACAATGACCT CACCAGCAGC AACCTCCAAG TGGAGGAAGA | 3360 |
| CCCTGTGGAC TTTGGGAACT CCTGGAAAGT GAGCTCGCAG TGTGCTGACA CCAGAAAAGT | 3420 |
| GCCTCTGGAC TCATCCCCTG CCACCTGCCA TAACAACATC ATGAAGCAGA CGATGGTGGA | 3480 |
| TTCCTCCTGT AGAATCCTTA CCAGTGACGT CTTCCAGGAC TGCAACAAGC TGGTGGACCC | 3540 |
| CGAGCCATAT CTGGATGTCT GCATTTACGA CACCTGCTCC TGTGAGTCCA TTGGGGACTG | 3600 |
| CGCCTGCTTC TGCGACACCA TTGCTGCCTA TGCCCACGTG TGTGCCCAGC ATGGCAAGGT | 3660 |
| GGTGACCTGG AGGACGGCCA CATTGTGCCC CCAGAGCTGC GAGGAGAGGA ATCTCCGGGA | 3720 |
| GAACGGGTAT GAGTGTGAGT GGCGCTATAA CAGCTGTGCA CCTGCCTGTC AAGTCACGTG | 3780 |
| TCAGCACCCT GAGCCACTGG CCTGCCCTGT GCAGTGTGTG GAGGGCTGCC ATGCCCACTG | 3840 |
| CCCTCCAGGG AAAATCCTGG ATGAGCTTTT GCAGACCTGC GTTGACCCTG AAGACTGTCC | 3900 |
| AGTGTGTGAG GTGGCTGGCC GGCGTTTTGC CTCAGGAAAG AAAGTCACCT TGAATCCCAG | 3960 |
| TGACCCTGAG CACTGCCAGA TTTGCCACTG TGATGTTGTC AACCTCACCT GTGAAGCCTG | 4020 |
| CCAGGAGCCG GGAGGCCTGG TGGTGCCTCC CACAGATGCC CCGGTGAGCC CCACCACTCT | 4080 |
| GTATGTGGAG GACATCTCGG AACCGCCGTT GCACGATTTC TACTGCAGCA GGCTACTGGA | 4140 |
| CCTGGTCTTC CTGCTGGATG GCTCCTCCAG GCTGTCCGAG GCTGAGTTTG AAGTGCTGAA | 4200 |
| GGCCTTTGTG GTGGACATGA TGGAGCGGCT GCGCATCTCC CAGAAGTGGG TCCGCGTGGC | 4260 |
| CGTGGTGGAG TACCACGACG GCTCCCACGC CTACATCGGG CTCAAGGACC GGAAGCGACC | 4320 |
| GTCAGAGCTG CGGCGCATTG CCAGCCAGGT GAAGTATGCG GGCAGCCAGG TGGCCTCCAC | 4380 |
| CAGCGAGGTC TTGAAATACA CACTGTTCCA AATCTTCAGC AAGATCGACC GCCCTGAAGC | 4440 |
| CTCCCGCATC GCCCTGCTCC TGATGGCCAG CCAGGAGCCC CAACGGATGT CCCGGAACTT | 4500 |
| TGTCCGCTAC GTCCAGGGCC TGAAGAAGAA GAAGGTCATT GTGATCCCGG TGGGCATTGG | 4560 |
| GCCCCATGCC AACCTCAAGC AGATCCGCCT CATCGAGAAG CAGGCCCCTG AGAACAAGGC | 4620 |
| CTTCGTGCTG AGCAGTGTGG ATGAGCTGGA GCAGCAAAGG GACGAGATCG TTAGCTACCT | 4680 |
| CTGTGACCTT GCCCCTGAAG CCCCTCCTCC TACTCTGCCC CCCCACATGG CACAAGTCAC | 4740 |
| TGTGGGCCCG GGGCTCTTGG GGGTTTCGAC CCTGGGGCCC AAGAGGAACT CCATGGTTCT | 4800 |
| GGATGTGGCG TTCGTCCTGG AAGGATCGGA CAAAATTGGT GAAGCCGACT TCAACAGGAG | 4860 |
| CAAGGAGTTC ATGGAGGAGG TGATTCAGCG GATGGATGTG GGCCAGGACA GCATCCACGT | 4920 |
| CACGGTGCTG CAGTACTCCT ACATGGTGAC CGTGGAGTAC CCCTTCAGCG AGGCACAGTC | 4980 |
| CAAAGGGGAC ATCCTGCAGC GGGTGCGAGA GATCCGCTAC CAGGGCGGCA ACAGGACCAA | 5040 |
| CACTGGGCTG GCCCTGCGGT ACCTCTCTGA CCACAGCTTC TTGGTCAGCC AGGGTGACCG | 5100 |
| GGAGCAGGCG CCCAACCTGG TCTACATGGT CACCGGAAAT CCTGCCTCTG ATGAGATCAA | 5160 |
| GAGGCTGCCT GGAGACATCC AGGTGGTGCC CATTGGAGTG GGCCCTAATG CCAACGTGCA | 5220 |
| GGAGCTGGAG AGGATTGGCT GGCCCAATGC CCCTATCCTC ATCCAGGACT TTGAGACGCT | 5280 |
| CCCCCGAGAG GCTCCTGACC TGGTGCTGCA GAGGTGCTGC TCCGGAGAGG GGCTGCAGAT | 5340 |
| CCCCACCCTC TCCCCTGCAC CTGACTGCAG CCAGCCCCTG GACGTGATCC TTCTCCTGGA | 5400 |
| TGGCTCCTCC AGTTTCCCAG CTTCTTATTT TGATGAAATG AAGAGTTTCG CCAAGGCTTT | 5460 |
| CATTTCAAAA GCCAATATAG GGCCTCGTCT CACTCAGGTG TCAGTGCTGC AGTATGGAAG | 5520 |
| CATCACCACC ATTGACGTGC CATGGAACGT GGTCCCGGAG AAAGCCCATT TGCTGAGCCT | 5580 |
| TGTGGACGTC ATGCAGCGGG AGGGAGGCCC CAGCCAAATC GGGGATGCCT TGGGCTTTGC | 5640 |
| TGTGCGATAC TTGACTTCAG AAATGCATGG TGCCAGGCCG GGAGCCTCAA AGGCGGTGGT | 5700 |
| CATCCTGGTC ACGGACGTCT CTGTGGATTC AGTGGATGCA GCAGCTGATG CCGCCAGGTC | 5760 |
| CAACAGAGTG ACAGTGTTCC CTATTGGAAT TGGAGATCGC TACGATGCAG CCCAGCTACG | 5820 |
| GATCTTGGCA GGCCCAGCAG GCGACTCCAA CGTGGTGAAG CTCCAGCGAA TCGAAGACCT | 5880 |
| CCCTACCATG GTCACCTTGG GCAATTCCTT CCTCCACAAA CTGTGCTCTG GATTTGTTAG | 5940 |
| GATTTGCATG GATGAGGATG GGAATGAGAA GAGGCCCGGG GACGTCTGGA CCTTGCCAGA | 6000 |
| CCAGTGCCAC ACCGTGACTT GCCAGCCAGA TGGCCAGACC TTGCTGAAGA GTCATCGGGT | 6060 |
| CAACTGTGAC CGGGGGCTGA GGCCTTCGTG CCCTAACAGC CAGTCCCCTG TTAAAGTGGA | 6120 |
| AGAGACCTGT GGCTGCCGCT GGACCTGCCC CTGCGTGTGC ACAGGCAGCT CCACTCGGCA | 6180 |
| CATCGTGACC TTTGATGGGC AGAATTTCAA GCTGACTGGC AGCTGTTCTT ATGTCCTATT | 6240 |
| TCAAAACAAG GAGCAGGACC TGGAGGTGAT TCTCCATAAT GGTGCCTGCA GCCCTGGAGC | 6300 |
| AAGGCAGGGC TGCATGAAAT CCATCGAGGT GAAGCACAGT GCCCTCTCCG TCGAGCTGCA | 6360 |
| CAGTGACATG GAGGTGACGG TGAATGGGAG ACTGGTCTCT GTTCCTTACG TGGGTGGGAA | 6420 |
| CATGGAAGTC AACGTTTATG GTGCCATCAT GCATGAGGTC AGATTCAATC ACCTTGGTCA | 6480 |
| CATCTTCACA TTCACTCCAC AAAACAATGA GTTCCAACTG CAGCTCAGCC CCAAGACTTT | 6540 |
| TGCTTCAAAG ACGTATGGTC TGTGTGGGAT CTGTGATGAG AACGGAGCCA ATGACTTCAT | 6600 |
| GCTGAGGGAT GGCACAGTCA CCACAGACTG GAAAACACTT GTTCAGGAAT GGACTGTGCA | 6660 |
| GCGGCCAGGG CAGACGTGCC AGCCCATCCT GGAGGAGCAG TGTCTTGTCC CCGACAGCTC | 6720 |
| CCACTGCCAG GTCCTCCTCT TACCACTGTT TGCTGAATGC CACAAGGTCC TGGCTCCAGC | 6780 |
| CACATTCTAT GCCATCTGCC AGCAGGACAG TTGCCACCAG GAGCAAGTGT GTGAGGTGAT | 6840 |
| CGCCTCTTAT GCCCACCTCT GTCGGACCAA CGGGGTCTGC GTTGACTGGA GGACACCTGA | 6900 |
| TTTCTGTGCT ATGTCATGCC CACCATCTCT GGTCTACAAC CACTGTGAGC ATGGCTGTCC | 6960 |
| CCGGCACTGT GATGGCAACG TGAGCTCCTG TGGGGACCAT CCCTCCGAAG GCTGTTTCTG | 7020 |
| CCCTCCAGAT AAAGTCATGT TGGAAGGCAG CTGTGTCCCT GAAGAGGCCT GCACTCAGTG | 7080 |
| CATTGGTGAG GATGGAGTCC AGCACCAGTT CCTGGAAGCC TGGGTCCCGG ACCACCAGCC | 7140 |
| CTGTCAGATC TGCACATGCC TCAGCGGGCG GAAGGTCAAC TGCACAACGC AGCCCTGCCC | 7200 |
| CACGGCCAAA GCTCCCACGT GTGGCCTGTG TGAAGTAGCC CGCCTCCGCC AGAATGCAGA | 7260 |
| CCAGTGCTGC CCCGAGTATG AGTGTGTGTG TGACCCAGTG AGCTGTGACC TGCCCCCAGT | 7320 |
| GCCTCACTGT GAACGTGGCC TCCAGCCCAC ACTGACCAAC CCTGGCGAGT GCAGACCCAA | 7380 |
| CTTCACCTGC GCCTGCAGGA AGGAGGAGTG CAAAAGAGTG TCCCCACCCT CCTGCCCCCC | 7440 |
| GCACCGTTTG CCCACCCTTC GGAAGACCCA GTGCTGTGAT GAGTATGAGT GTGCCTGCAA | 7500 |
| CTGTGTCAAC TCCACAGTGA GCTGTCCCCT TGGGTACTTG GCCTCAACCG CCACCAATGA | 7560 |
| CTGTGGCTGT ACCACAACCA CCTGCCTTCC CGACAAGGTG TGTGTCCACC GAAGCACCAT | 7620 |
| CTACCCTGTG GGCCAGTTCT GGGAGGAGGG CTGCGATGTG TGCACCTGCA CCGACATGGA | 7680 |
| GGATGCCGTG ATGGGCCTCC GCGTGGCCCA GTGCTCCCAG AAGCCCTGTG AGGACAGCTG | 7740 |
| TCGGTCGGGC TTCACTTACG TTCTGCATGA AGGCGAGTGC TGTGGAAGGT GCCTGCCATC | 7800 |
| TGCCTGTGAG GTGGTGACTG GCTCACCGCG GGGGGACTCC CAGTCTTCCT GGAAGAGTGT | 7860 |
| CGGCTCCCAG TGGGCCTCCC CGGAGAACCC CTGCCTCATC AATGAGTGTG TCCGAGTGAA | 7920 |
| GGAGGAGGTC TTTATACAAC AAAGGAACGT CTCCTGCCCC GAGCTGGAGG TCCCTGTCTG | 7980 |
| CCCCTCGGGC TTTCAGCTGA GCTGTAAGAC CTCAGCGTGC TGCCCAAGCT GTCGCTGTGA | 8040 |
| GCGCATGGAG GCCTGCATGC TCAATGGCAC TGTCATTGGG CCCGGGAAGA CTGTGATGAT | 8100 |
| CGATGTGTGC ACGACCTGCC GCTGCATGGT GCAGGTGGGG GTCATCTCTG GATTCAAGCT | 8160 |
| GGAGTGCAGG AAGACCACCT GCAACCCCTG CCCCCTGGGT TACAAGGAAG AAAATAACAC | 8220 |
| AGGTGAATGT TGTGGGAGAT GTTTGCCTAC GGCTTGCACC ATTCAGCTAA GAGGAGGACA | 8280 |
| GATCATGACA CTGAAGCGTG ATGAGACGCT CCAGGATGGC TGTGATACTC ACTTCTGCAA | 8340 |
| GGTCAATGAG AGAGGAGAGT ACTTCTGGGA GAAGAGGGTC ACAGGCTGCC CACCCTTTGA | 8400 |
| TGAACACAAG TGTCTGGCTG AGGGAGGTAA AATTATGAAA ATTCCAGGCA CCTGCTGTGA | 8460 |
| CACATGTGAG GAGCCTGAGT GCAACGACAT CACTGCCAGG CTGCAGTATG TCAAGGTGGG | 8520 |
| AAGCTGTAAG TCTGAAGTAG AGGTGGATAT CCACTACTGC CAGGGCAAAT GTGCCAGCAA | 8580 |
| AGCCATGTAC TCCATTGACA TCAACGATGT GCAGGACCAG TGCTCCTGCT GCTCTCCGAC | 8640 |
| ACGGACGGAG CCCATGCAGG TGGCCCTGCA CTGCACCAAT GGCTCTGTTG TGTACCATGA | 8700 |
| GGTTCTCAAT GCCATGGAGT GCAAATGCTC CCCCAGGAAG TGCAGCAAGT GAGGCTGCTG | 8760 |
| CAGCTGCATG GGTGCCTGCT GCTGCCTGCC TTGGCCTGAT GGCCAGGCCA GAGTGCTGCC | 8820 |
| AGTCCTCTGC ATGTTCTGCT CTTGTGCCCT TCTGAGCCCA CAATAAAGGC TGAGCTCTTA | 8880 |
| TCTTGCTGCA TGTTCTGCTC TTGTGCCCTT CTGAGCCCAC AAT | |

AAC7 DNA sequence
Gene name: KIAA1294 protein
Probeset Accession #: AA432248
Nucleic Acid Accession #: AB037715
Coding sequence: 370-3489 (predicted start/stop codons underlined)

| | |
|---|---|
| GAACGCTCAC AGAACAGGCA GTGCAATTCC ATGTTCCTCT TAAGTATGTT AGCCCTACCG | 60 |
| GGAGCTGAGC TGGCCAGTCT ACTTGGAGAG GAAAAGTAGA TCTGGGGAAG GTGGAAGGGT | 120 |
| CAGTTCCTAA GTGACTTCCT CCTCGGGGAT GGTAAGGGCA TTTGCTGATC TCCAGTGACT | 180 |
| GCCTGGTGCC TCATGGTCAG ACTCGGCTGT CTCACTCCCA GATATCTGAT TTTGCAAAAA | 240 |
| GGGACACACC TATCTGCAGC AAAGAAGACA CTGACCAGAT TGCGAGCGGT GCTTTTGGAT | 300 |
| GCTCTGTAGC CACCCGGGGC CCAGGAGGAC TGACTCGGCA GCAGGATTCG TGCATGGGAA | 360 |
| TCGGAGACCA TGGCAGTGCA GCTGGTGCCC GACTCAGCTC TCGGCCTGCT GATGATGACG | 420 |
| GAGGGCCGCC GATGTCAAGT ACATCTTCTT GATGACAGGA AGCTGGAACT CCTAGTACAG | 480 |
| CCCAAGCTGT TGGCCAAGGA GCTTCTTGAC CTTGTGGCTT CTCACTTCAA TCTGAAGGAA | 540 |
| AAGGAGTACT TTGGAATAGC ATTCACAGAT GAAACGGGAC ACTTAAACTG GCTTCAGCTA | 600 |
| GATCGAAGAG TATTGGAACA TGACTTCCCT AAAAAGTCAG GACCCGTGGT TTTATACTTT | 660 |
| TGTGTCAGGT TCTATATAGA AAGCATTTCA TACCTGAAGG ATAATGCTAC CATTGAGCTT | 720 |
| TTCTTTCTGA ACGCGAAGTC CTGCATCTAC AAGGAGCTTA TTGACGTTGA CAGCGAAGTG | 780 |
| GTGTTTGAAT TAGCTTCCTA TATTTTACAG GAGGCAAAGG GAGATTTTTC TAGCAATGAA | 840 |
| GTTGTGAGGA GTGACTTGAA GAAGCTGCCA GCCCTTCCCA CCCAAGCCCT GAAGGAGCAC | 900 |
| CCTTCCCTGG CCTACTGTGA AGACAGAGTC ATTGAGCACT ACAAGAAACT GAACGGTCAG | 960 |
| ACAAGAGGTC AAGCAATCGT AAACTACATG AGCATCGTGG AGTCTCTCCC AACCTACGGG | 1020 |
| GTTCACTATT ATGCAGTGAA GGACAAGCAG GGCATACCAT GGTGGCTGGG CCTGAGCTAC | 1080 |
| AAAGGGATCT TCCAGTATGA CTACCATGAT AAAGTGAAGC CAAGAAAGAT ATTCCAATGG | 1140 |
| AGACAGTTGG AAAACCTGTA CTTCAGAGAA AAGAAGTTTT CCGTGGAAGT TCATGACCCA | 1200 |
| CGCAGGGCTT CAGTGACAAG GAGGACGTTT GGGCACAGCG GCATTGCAGT GCACACGTGG | 1260 |
| TATGCATGTC CGGCATTGAT CAAGTCCATC TGGGCTATGG CCATAAGCCA ACACCAGTTC | 1320 |
| TATCTGGACA GAAAGCAGAG TAAGTCCAAA ATCCATGCAG CACGCAGCCT GAGTGAGATC | 1380 |
| GCCATCGACC TGACCGAGAC GGGGACGCTG AAGACCTCGA AGCTGGCCAA CATGGGTAGC | 1440 |
| AAGGGGAAGA TCATCAGCGG CAGCAGCGGC AGCCTGCTGT CTTCAGGTTC TCAGGAATCA | 1500 |
| GATAGCTCGC AGTCGGCCAA GAAGGACATG CTGGCTGCCT TGAAGTCCAG GCAGGAAGCT | 1560 |
| CTGGAGGAAA CCCTGCGTCA GAGGCTGGAG GAACTGAAGA AGCTGTGTCT CCGAGAAGCT | 1620 |
| GAGCTCACGG GCAAGCTGCC AGTAGAATAT CCCCTGGATC CAGGGGAGGA ACCACCCATT | 1680 |
| GTTCGGAGAA GAATAGGAAC AGCCTTCAAA CTGGATGAAC AGAAAATCCT GCCCAAAGGA | 1740 |
| GAGGAAGCTG AGCTGGAACG CCTGGAACGA GAGTTTGCCA TTCAGTCCCA GATTACGGAG | 1800 |
| GCCGCCCGCC GCCTAGCCAG TGACCCCAAC GTCAGCAAAA AACTGAAGAA ACAAAGGAAA | 1860 |
| ACCTCGTATC TGAATGCACT GAAGAAACTG CAGGAGATTG AAAATGCAAT CAATGAGAAC | 1920 |
| CGCATCAAGT CTGGGAAGAA ACCCACCCAG AGGGCTTCGC TGATCATAGA CGATGGAAAC | 1980 |
| ATTGCCAGTG AAGACAGCTC CCTCTCAGAT GCCCTTGTTC TTGAGGATGA AGACTCTCAG | 2040 |
| GTTACCAGCA CAATATCCCC CCTACATTCT CCTCACAAGG GACTCCCTCC TCGGCCACCG | 2100 |
| TCGCACAACA GGCCTCCTCC TCCCCAGTCC CTGGAGGGAC TCCGACAGAT GCACTATCAC | 2160 |
| CGCAACGACT ATGACAAGTC ACCCATCAAG CCCAAAATGT GGAGTGAGTC CTCTTTAGAT | 2220 |
| GAACCCTATG AGAAGGTCAA GAAGCGCTCC TCTCACAGCC ATTCCAGCAG CCACAAGCGC | 2280 |
| TTCCCCAGCA CAGGAAGCTG TGCGGAAGCC GGCGGAGGAA GCAACTCCTT GCAGAACAGC | 2340 |
| CCCATCCGCG GCCTCCCGCA CTGGAACTCC CAGTCCAGCA TGCCGTCCAC GCCAGACCTG | 2400 |
| CGGGTCCGGA GTCCCCACTA CGTCCATTCC ACGAGGTCGG TGGACATCAG CCCCACCCGA | 2460 |
| CTGCACAGCC TCGCACTGCA CTTTAGGCAC CGGAGCTCCA GCCTGGAGTC CCAGGGCAAG | 2520 |
| CTCCTGGGCT CGGAAAACGA CACCGGGAGC CCCGACTTCT ACACCCCGCG GACTCGTAGC | 2580 |
| AGCAACGGCT CAGACCCCAT GGACGACTGC TCGTCGTGCA CCAGCCACTC GAGCTCGGAG | 2640 |
| CACTACTACC CGGCGCAGAT GAACGCCAAC TACTCCACGC TGGCCGAGGA CTCGCCGTCC | 2700 |
| AAGGCGCGCC AGAGGCAGAG GCAGCGGCAG CGGGCGGCGG GCGCACTGGG CTCAGCCAGC | 2760 |
| TCGGGCAGCA TGCCCAACCT GGCGGCGCGC GGGGGTGCGG GGGGCGCGGG GGGCGCGGGG | 2820 |
| GGCGGTGTGT ACCTGCACAG CCAGAGCCAG CCCAGCTCGC AGTACCGCAT CAAGGAGTAC | 2880 |
| CCGCTGTACA TCGAGGGCGG CGCCACGCCC GTGGTGGTGC GCAGCCTGGA GAGCGACCAG | 2940 |
| GAGTGCCACT ACAGCGTCAA GGCTCAGTTC AAGACGTCCA ACTCCTACAC GGCGGGCGGC | 3000 |
| CTGTTCAAGG AGAGCTGGCG CGGCGGCGGC GGCGACGAGG GCGACACGGG CCGCCTGACG | 3060 |
| CCGTCGCGAT CGCAGATCCT GCGGACTCCG TCGCTGGGCC GCGAGGGCGC CCACGACAAG | 3120 |
| GGCGCGGGCC GTGCCGCCGT CTCAGACGAG CTGCGCCAGT GGTACCAGCG TTCCACCGCC | 3180 |
| TCGCACAAGG AGCACAGCCG CCTGTCGCAC ACCAGCTCCA CCTCCTCGGA CAGCGGCTCG | 3240 |
| CAGTACAGCA CCTCCTCCCA GAGCACCTTC GTGGCGCACA GCAGGGTCAC CAGGATGCCC | 3300 |
| CAGATGTGCA AGGCCACGTC AGCTGCCTTA CCTCAAAGCC AGAGAAGCTC GACACCGTCA | 3360 |
| AGTGAAATTG GAGCCACCCC CCCAAGCAGC CCCCACCACA TCCTAACCTG GCAGACTGGA | 3420 |
| GAAGCAACAG AAAACTCACC CATTCTGGAT GGGTCTGAGT CTCCACCTCA CCAAAGTACT | 3480 |
| GATGAATAGA GGAGCTACAA TGATAGCTGT TTCCTGGATT CCTCCCTCTA TCCAGAACTA | 3540 |
| GCTGATGTCC AGTGGTACGG GCAGGAAAAA GCCAAGCCCG GGACCCTCGT GTGAGCCAGC | 3600 |
| CCGGCCTAAT CTGACCGCCT CAACGCCATT CTGAGATCAC CTCACTGCCT CTCATTTGCC | 3660 |
| TTACCCAGAC GCACCGTCAC CCTGCACCAG CTTTGGCCCT CAGCACTTTT TTTCTCCTGT | 3720 |
| CTCCGCATTC CCTCCCCCTT GAAAACCTGA CTGAGGAGAC ATTCTGGAAG GTTCCGGTCC | 3780 |
| CACTGTGTGT CCCCTGGCGC TCTTGCCCAT AGAGAGCCAG ACACCAATCC TCAATGGCAC | 3840 |
| CTTGGTGGCT TCCCTCTGCC ATGACAGCCC CTAGGCCAGG AACCATCAGG GGGGCCAGCC | 3900 |
| GGCATCCAAT TCCTGCGGAT AAGTAGCGTT GGGAGAGAAC GGGAAAGGGG ACTTGGGTTA | 3960 |
| CAGGGTGACC CAGAAAGACG ATTCAGCTGT GTCCAGCCTG CCACCCATAC GTAGGCCAAC | 4020 |
| CAAGCACTTC ATGAAGAGGA GGCCTCGTGG CATATTCAGT TTACACCTGA AATATTCCTT | 4080 |
| GATGGGACAG CTTGTGGGGA TGGCTATGGG GGAAGGGGAG GTTGAGAAAG GAAGTTCTCG | 4140 |
| ACACCAGAAA TGCATCGGAG GACCACAATC AGTTCTATGC TGCCAAAGAT TAAAAATAAA | 4200 |
| TAAAAACATA AAAAATTAAG AGGGGCCAAG AGGAAGACAT TCTTTCTGCA AGGAAATTTC | 4260 |
| TTTTAAATTC TGAACTGCTA CTACACACAA GTGAAAGTCA ACCCTATGTA AACTGGTGTC | 4320 |
| CTCTCTCTAG CCCTCTCCCT TACTGGCCCA CTTCTCTCTC CGTAGAGAGC CTGAAAAACT | 4380 |
| GCCCCAATGC CACGGTAAAG GCGAGGAAGT CTTGGCTGGC GTTGCTGACT CACAGTCGCC | 4440 |
| ATCCATCTGG ACACAAAGAG AGACCTGTGG GAGTCATAGA GGGTACTGTT AGCCCCGGTC | 4500 |
| CATGCAGGGG GTTCAGCCGA GCCCAAGACT CAAAGCTGCT TTCCTTTCAG GATTTGTAGT | 4560 |
| AACGTAAGGT GATAATGGCC AAAAGTGGTT CTCTCTCATT AAACCAACCA GTAAAAGCGT | 4620 |
| ATCCTATTTT TTTGCATAAG GTGTTTCATT TTCGTTTTTA TGGGAAACCA AGGGAAAAGC | 4680 |
| ACATTGCGAT CCATTCAGTG TTTAACTGTC GTGGCTCATT TTCTGTTCGT TAGCACTTGT | 4740 |
| GTGACAAAAG AGCTCAGATC CGACTTCTCC TATGTGTCAC TTATTCCAAG AACCCAACTA | 4800 |
| TGCCCTTAGG TAGAAAGATT TGACTCGTGT GTCTACTAGC CAACAGGCAG AGCAGGGTTG | 4860 |
| AAAAAAATAT CAGCTCCCAA AGGGCCCATG TGTCTACATC ATCAGTTACT GTCATGCACC | 4920 |
| ACATTTGTGT GCAGATACCA AAAGAGGAGG AAAGAAGAAA AAAATTAATG TGTGGGAGCT | 4980 |
| GCACGTTTAC ATGTTTTGAG CTATGCTTCA AACACAACTG GAAAGCCATC AATCTTCAAA | 5040 |
| GGCCTCAAAA ATACTTTTAT AGTAACAAGT GCACGACTTT AGTTGGGTTA TTCAAGATGG | 5100 |
| CACAAAAAGG TTTCCGCAGA GGTGGTATGC TGTGCTTTTG GCGCAAGTGG TGGGGGGATG | 5160 |
| GGGGTGGGGG TGGAATTTTT TTCTCACTCT AATGACTTCC TATTGGAAAG GCATTGACAG | 5220 |
| CCAGGGACAG GAGCCAGGGT GGGGGTAGTT TTGTGGGAAA GCAGAACTGA AGTTAGCTTA | 5280 |
| AGCATAAAAA CAAAGAAAAA TCTTCGCTTT TCATGTATGT GGAATCCAAG AATAACCATA | 5340 |
| GGCTCTACCA GACCAGGAGG GTAAGGATGG ACACTAAAAT GAAACAAATA CCAAGGTATT | 5400 |
| CCTTCTGCTG CAGCCTGGAG ACCACCGAGA GTCGAGCTGG GGCACACACA CACCTGGCCG | 5460 |
| GGACCCGGCA GGGACAAGGC GGGCCGTGGC CTCCTCCACC AAGTCTCTCT AGACAATTCA | 5520 |
| GGGCCTGCTT TCCCCAGCTC CATGCATGGC TGGACTGGTG ATTCCAGGGT GCAGAAGGGA | 5580 |
| TTCATATTCC CAGAACGCTT TAAGTGTACA CCTGCAGGAT AAAGAGATAC CGGTTACATT | 5640 |
| ATTAAATGAT TCTAGGGATT CACTGGGGGA TATTTTTGTT GCTTTTACTT TCATGGTTAG | 5700 |
| AGCTACAAAG AACAGTGATT TTTTTTTTTT CTCCCTTCCC CATTCAGAAA CATTATACAT | 5760 |
| TGGGCCATTT TTCTTTCTCC CAAAGAAGAT TCATGGATAG TCAGACTGAA CTGTGTGCAA | 5820 |
| CAGGAAAAGT CAAAAGGGAA AAGGCAGCTG ATGAGGTTAC ATGGTTACAT GTTCTACATC | 5880 |
| ATGCAGAGTA GCTTGAAATC TAGTCTGGAG AAAACTGGAT CAAGATTCTA GCCCACTGGA | 5940 |
| GTTGCAAGGA ATGAGAGGCA AAAATTCTAA AGATTTGGGT TATATTTTCA ACTTGGGGGA | 6000 |
| CAGAGAGAAA TGGAGAGCAG GAATTACAGT TCCAACAAAC ATCATGATAG TCTGGTAGTC | 6060 |
| AAGACAGAGA TTAAGTAAAA CAGGTTTTAC TGTTTAGCTG AGTTCAGTTA ATACAAAATG | 6120 |
| TACATAAAAC GTTAGTCCTT TGAGACTGAC ATGATTAATG ATCAGTGTGG TGGGAAATGA | 6180 |
| TGTAGTTATT GTACACAAGC ACTTGCAAAC TCTTTATCCC TATTTCTTTA AAACAAAATA | 6240 |
| AGGTGAAATA CGAAGTCCTT GGTCTGATAT AAAGCCCCTA TTGGATTCTT CGGATGCGTA | 6300 |
| AAAGAAATTG CCTGTTTCAG CCAGAAGACT GGTGAAAACA CATACATCAG ACTATGTTGT | 6360 |
| GAGCCAGGTT GATTTTTTAT TTTATTATAT GCAGGTGAGT GTTGAAACTG TTAAAATTCC | 6420 |
| AATTTGTTTT CATTCAGTAT TAGTTTAGTT CTAAATATAG CAAACCCCAT CCAGGTGCTA | 6480 |
| TCAGATGACC AGTTACTGCT TAGTTAACTA GGTGTAAAGT TTTACATATA CATTAATTTC | 6540 |
| AATAGTTTAT TACAAGTTGT GTAAAATGGA CTCTAGTTTA ATAATGGGGG AAAAAAGATT | 6600 |
| AGGTTGGTCC TGAAACTGAC TGTAGAGCAT GTAAAATGAT TTTACTGGAT TCTGTTCAAC | 6660 |
| TGTAATGAAT GAAAAAGATG TACGTTGTAG ACAAAGTTGC AGAATTAAAA AAAGAAATCT | 6720 |
| GCTTTTAATT TATTCTTTTT GTATTAAGAA TTTGTATAGT ATCTTTACAT TTTGCAAAAC | 6780 |
| AGTGTTGTCA ACACTTATTA AAGCATTTTC AAAATG | |

ACG8 DNA sequence
Gene name: ubiquitin E3 ligase SMURF2
Unigene number: Hs.21806 (3′UTR only)
Probeset Accession #: AA398243
Nucleic Acid Accession #: AF301463 cluster
Coding sequence: 9-2255 (predicted start/stop codons underlined)

| | |
|---|---|
| CCGGGGACAT GTCTAACCCC GGAGGCCGGA GGAACGGGCC CGTCAAGCTG CGCCTGACAG | 60 |
| TACTCTGTGC AAAAAACCTG GTGAAAAAGG ATTTTTTCCG ACTTCCTGAT CCATTTGCTA | 120 |
| AGGTGGTGGT TGATGGATCT GGGCAATGCC ATTCTACAGA TACTGTGAAG AATACGCTTG | 180 |
| ATCCAAAGTG GAATCAGCAT TATGACCTGT ATATTGGAAA GTCTGATTCA GTTACGATCA | 240 |
| GTGTATGGAA TCACAAGAAG ATCCATAAGA AACAAGGTGC TGGATTTCTC GGTTGTGTTC | 300 |
| GTCTTCTTTC CAATGCCATC AACCGCCTCA AAGACACTGG TTATCAGAGG TTGGATTTAT | 360 |
| GCAAACTCGG GCCAAATGAC AATGATACAG TTAGAGGACA GATAGTAGTA AGTCTTCAGT | 420 |
| CCAGAGACCG AATAGGCACA GGAGGACAAG TTGTGGACTG CAGTCGTTTA TTTGATAACG | 480 |
| ATTTACCAGA CGGCTGGGAA GAAAGGAGAA CCGCCTCTGG AAGAATCCAG TATCTAAACC | 540 |
| ATATAACAAG AACTACGCAA TGGGAGCGCC CAACACGACC GGCATCCGAA TATTCTAGCC | 600 |
| CTGGCAGACC TCTTAGCTGC TTTGTTGATG AGAACACTCC AATTAGTGGA ACAAATGGTG | 660 |
| CAACATGTGG ACAGTCTTCA GATCCCAGGC TGGCAGAGAG GAGAGTCAGG TCACAACGAC | 720 |
| ATAGAAATTA CATGAGCAGA ACACATTTAC ATACTCCTCC AGACCTACCA GAAGGCTATG | 780 |
| AACAGAGGAC AACGCAACAA GGCCAGGTGT ATTTCTTACA TACACAGACT GGTGTGAGCA | 840 |
| CATGGCATGA TCCAAGAGTG CCCAGGGATC TTAGCAACAT CAATTGTGAA GAGCTTGGTC | 900 |
| CGTTGCCTCC TGGATGGGAG ATCCGTAATA CGGCAACAGG CAGAGTTTAT TTCGTTGACC | 960 |
| ATAACAACAG AACAACACAA TTTACAGATC CTCGGCTGTC TGCTAACTTG CATTTAGTTT | 1020 |
| TAAATCGGCA GAACCAATTG AAAGACCAAC AGCAACAGCA AGTGGTATCG TTATGTCCTG | 1080 |
| ATGACACAGA ATGCCTGACA GTCCCAAGGT ACAAGCGAGA CCTGGTTCAG AAACTAAAAA | 1140 |
| TTTTGCGGCA AGAACTTTCC CAACAACAGC CTCAGGCAGG TCATTGCCGC ATTGAGGTTT | 1200 |
| CCAGGGAAGA GATTTTTGAG GAATCATATC GACAGGTCAT GAAAATGAGA CCAAAAGATC | 1260 |
| TCTGGAAGCG ATTAATGATA AAATTTCGTG GAGAAGAAGG CCTTGACTAT GGAGGCGTTG | 1320 |
| CCAGGGAATG GTTGTATCTC TTGTCACATG AAATGTTGAA TCCATACTAT GGCCTCTTCC | 1380 |
| AGTATTCAAG AGATGATATT TATACATTGC AGATCAATCC TGATTCTGCA GTTAATCCGG | 1440 |
| AACATTTATC CTATTTCCAC TTTGTTGGAC GAATAATGGG AATGGCTGTG TTTCATGGAC | 1500 |
| ATTATATTGA TGGTGGTTTC ACATTGCCTT TTTATAAGCA ATTGCTTGGG AAGTCAATTA | 1560 |
| CCTTGGATGA CATGGAGTTA GTAGATCCGG ATCTTCACAA CAGTTTAGTG TGGATACTTG | 1620 |
| AGAATGATAT TACAGGTGTT TTGGACCATA CCTTCTGTGT TGAACATAAT GCATATGGTG | 1680 |
| AAATTATTCA GCATGAACTT AAACCAAATG GCAAAAGTAT CCCTGTTAAT GAAGAAAATA | 1740 |
| AAAAAGAATA TGTCAGGCTC TATGTGAACT GGAGATTTTT ACGAGGCATT GAGGCTCAAT | 1800 |
| TCTTGGCTCT GCAGAAAGGA TTTAATGAAG TAATTCCACA ACATCTGCTG AAGACATTTG | 1860 |
| ATGAGAAGGA GTTAGAGCTC ATTATTTGTG GACTTGGAAA GATAGATGTT AATGACTGGA | 1920 |
| AGGTAAACAC CCGGTTAAAA CACTGTACAC CAGACAGCAA CATTGTCAAA TGGTTCTGGA | 1980 |
| AAGCTGTGGA GTTTTTTGAT GAAGAGCGAC GAGCAAGATT GCTTCAGTTT GTGACAGGAT | 2040 |
| CCTCTCGAGT GCCTCTGCAG GGCTTCAAAG CATTGCAAGG TGCTGCAGGC CCGAGACTCT | 2100 |
| TTACCATACA CCAGATTGAT GCCTGCACTA ACAACCTGCC GAAAGCCCAC ACTTGCTTCA | 2160 |
| ATCGAATAGA CATTCCACCC TATGAAAGCT ATGAAAAGCT ATATGAAAAG CTGCTAACAG | 2220 |
| CCATTGAAGA AACATGTGGA TTTGCTGTGG AATGACAAGC TTCAAGGATT TACCCAGGAC | |

ACH1 DNA sequence
Gene name: EST
Unigene number: Hs.30089
Probeset Accession #: AA410480
CAT cluster#: 96816_1
Coding sequence: Partial sequence, possible frameshift. Predicted stop codon
underlined.

| | |
|---|---|
| CTCCACTATG GACAGAGCCT CCACTGAGCT GCTGCCTGCC CGCCACATAC CCAGCTGACA | 60 |
| GGGGCCCCGC AGAGCCATGC AGCTGTGCTG GGGTGATCCT GGGCTTCCTC CTGTTCCGAG | 120 |
| GCCACAACTC CCAGCCCACA ATGACCCAGA CCTCTAGCTC TCAGGGAGGC CTTGGCGGTC | 180 |
| TAAGTCTGAC CACAGAGCCA GTTTCTTCCA ACCCAGGATA CATCCCTTCC TCAGAGGCTA | 240 |
| ACAGGCCAAG CCATCTGTCC AGCACTGGTA CCCCAGGCGC AGGTGTCCCC AGCAGTGGAA | 300 |
| GAGACGGAGG CACAAGCAGA GACACATTTC AAACTGTTCC CCCCAATTCA ACCACCATGA | 360 |
| GCCTGAGCAT GAGGGAAGAT GCGACCATCC TGCCCAGCCC CACGTCAGAG ACTGTGCTCA | 420 |
| CTGTGGCTGC ATTTGGTGTT ATCAGCTTCA TTGTCATCCT GGTGGTTGTG GTGATCATCC | 480 |
| TAGTTGGTGT GGTCAGCCTG AGGTTCAAGT GTCGGAAGAG CAAGGAGTCT GGAGATCCCC | 540 |
| AGAAACCTGG AGAGCGGGAG GAGAAGCTGG GACATAGGAG GGAACCCTAC CCCTGGAATT | 600 |
| GACTTGGACT CTGGGTCTGG AAACGCAAGT TCAAATCTCA CCCATTTGTT CCAGGAGGTT | 660 |
| CTGGCTGATG AGGAAGACCC TTGTGGGAGG GGGGCCCCTG CCCTCCAGTT AGCTCTTCTT | 720 |
| GGCTGTGCTG GGTTCCATGT TCTCATGCAG GGATGGAGTC GGGTGGAGAG CCCACTCTGG | 780 |
| CTAGGGGGCG GCAGGCTGAG AGCTCACCTG TTCAGCAGAG AAGTGGAACT CACTTTGCTC | 840 |
| CTGGAGCCTC CCTACACAGT ACTTATCTGG GAAGGGAATG CCGGACTCTT GTTGGCCCCT | 900 |
| TTGTCCCCCC GACTGGCCCC CTTCGCCG | |

ACJ2 DNA sequence
Gene name: Complement component C1q receptor
Unigene number: Hs.97199
Probeset Accession #: AA487558
Nucleic Acid Accession #: NM_012072
Coding sequence: 149-2107. predicted start/stop codons underlined

| | |
|---|---|
| AAAGCCCTCA GCCTTTGTGT CCTTCTCTGC GCCGGAGTGG CTGCAGCTCA CCCCTCAGCT | 60 |
| CCCCTTGGGG CCCAGCTGGG AGCCGAGATA GAAGCTCCTG TCGCCGCTGG GCTTCTCGCC | 120 |
| TCCCGCAGAG GGCCACACAG AGACCGGGAT GGCCACCTCC ATGGGCCTGC TGCTGCTGCT | 180 |
| GCTGCTGCTC CTGACCCAGC CCGGGGCGGG GACGGGAGCT GACACGGAGG CGGTGGTCTG | 240 |
| CGTGGGGACC GCCTGCTACA CGGCCCACTC GGGCAAGCTG AGCGCTGCCG AGGCCCAGAA | 300 |
| CCACTGCAAC CAGAACGGGG GCAACCTGGC CACTGTGAAG AGCAAGGAGG AGGCCCAGCA | 360 |
| CGTCCAGCGA GTACTGGCCC AGCTCCTGAG GCGGGAGGCA GCCCTGACGG CGAGGATGAG | 420 |
| CAAGTTCTGG ATTGGGCTCC AGCGAGAGAA GGGCAAGTGC CTGGACCCTA GTCTGCCGCT | 480 |
| GAAGGGCTTC AGCTGGGTGG GCGGGGGGGA GGACACGCCT TACTCTAACT GGCACAAGGA | 540 |
| GCTCCGGAAC TCGTGCATCT CCAAGCGCTG TGTGTCTCTG CTGCTGGACC TGTCCCAGCC | 600 |
| GCTCCTTCCC AACCGCCTGC CCAAGTGGTC TGAGGGCCCC TGTGGGAGCC CAGGCTCCCC | 660 |
| CGGAAGTAAC ATTGAGGGCT TCGTGTGCAA GTTCAGCTTC AAAGGCATGT GCCGGCCTCT | 720 |
| GGCCCTGGGG GGCCCAGGTC AGGTGACCTA CACCACCCCC TTCCAGACCA CCAGTTCCTC | 780 |
| CTTGGAGGCT GTGCCCTTTG CCTCTGCGGC CAATGTAGCC TGTGGGGAAG GTGACAAGGA | 840 |
| CGAGACTCAG AGTCATTATT TCCTGTGCAA GGAGAAGGCC CCCGATGTGT TCGACTGGGG | 900 |
| CAGCTCGGGC CCCCTCTGTG TCAGCCCCAA GTATGGCTGC AACTTCAACA ATGGGGGCTG | 960 |
| CCACCAGGAC TGCTTTGAAG GGGGGGATGG CTCCTTCCTC TGCGGCTGCC GACCAGGATT | 1020 |
| CCGGCTGCTG GATGACCTGG TGACCTGTGC CTCTCGAAAC CCTTGCAGCT CCAGCCCATG | 1080 |
| TCGTGGGGGG GCCACGTGCG TCCTGGGACC CCATGGGAAA AACTACACGT GCCGCTGCCC | 1140 |
| CCAAGGGTAC CAGCTGGACT CGAGTCAGCT GGACTGTGTG GACGTGGATG AATGCCAGGA | 1200 |
| CTCCCCCTGT GCCCAGGAGT GTGTCAACAC CCCTGGGGGC TTCCGCTGCG AATGCTGGGT | 1260 |
| TGGCTATGAG CCGGGCGGTC CTGGAGAGGG GGCCTGTCAG GATGTGGATG AGTGTGCTCT | 1320 |
| GGGTCGCTCG CCTTGCGCCC AGGGCTGCAC CAACACAGAT GGCTCATTTC ACTGCTCCTG | 1380 |
| TGAGGAGGGC TACGTCCTGG CCGGGGAGGA CGGGACTCAG TGCCAGGACG TGGATGAGTG | 1440 |
| TGTGGGCCCG GGGGGCCCCC TCTGCGACAG CTTGTGCTTC AACACACAAG GGTCCTTCCA | 1500 |
| CTGTGGCTGC CTGCCAGGCT GGGTGCTGGC CCCAAATGGG GTCTCTTGCA CCATGGGGCC | 1560 |
| TGTGTCTCTG GGACCACCAT CTGGGCCCCC CGATGAGGAG GACAAAGGAG AGAAAGAAGG | 1620 |
| GAGCACCGTG CCCCGCGCTG CAACAGCCAG TCCCACAAGG GGCCCCGAGG GCACCCCCAA | 1680 |
| GGCTACACCC ACCACAAGTA GACCTTCGCT GTCATCTGAC GCCCCCATCA CATCTGCCCC | 1740 |
| ACTCAAGATG CTGGCCCCCA GTGGGTCCTC AGGCGTCTGG AGGGAGCCCA GCATCCATCA | 1800 |
| CGCCACAGCT GCCTCTGGCC CCCAGGAGCC TGCAGGTGGG GACTCCTCCG TGGCCACACA | 1860 |
| AAACAACGAT GGCACTGACG GGCAAAAGCT GCTTTTATTC TACATCCTAG GCACCGTGGT | 1920 |
| GGCCATCCTA CTCCTGCTGG CCCTGGCTCT GGGGCTACTG GTCTATCGCA AGCGGAGAGC | 1980 |
| GAAGAGGGAG GAGAAGAAGG AGAAGAAGCC CCAGAATGCG GCAGACAGTT ACTCCTGGGT | 2040 |
| TCCAGAGCGA GCTGAGAGCA GGGCCATGGA GAACCAGTAC AGTCCGACAC CTGGGACAGA | 2100 |
| CTGCTGAAAG TGAGGTGGCC CTAGAGACAC TAGAGTCACC AGCCACCATC CTCAGAGCTT | 2160 |
| TGAACTCCCC ATTCCAAAGG GGCACCGACA TTTTTTTGAA AGACTGGACT GGAATCTTAG | 2220 |
| CAAACAATTG TAAGTCTCCT CCTTAAAGGC CCCTTGGAAC ATGCAGGTAT TTTCTACGGG | 2280 |
| TGTTTGATGT TCCTGAAGTG GAAGCTGTGT GTTGGCGTGC CACGGTGGGG ATTTCGTGAC | 2340 |
| TCTATAATGA TTGTTACTCC CCCTCCCTTT TCAAATTCCA ATGTGACCAA TTCCGGATCA | 2400 |
| GGGTGTGAGG AGGCTGGGGC TAAGGGGCTC CCCTGAATAT CTTCTCTGCT CACTTCCACC | 2460 |
| ATCTAAGAGG AAAAGGTGAG TTGCTCATGC TGATTAGGAT TGAAATGATT TGTTTCTCTT | 2520 |
| CCTAGGATGA AAACTAAATC AATTAATTAT TCAATTAGGT AAGAAGATCT GGTTTTTTGG | 2580 |
| TCAAAGGGAA CATGTTCGGA CTGGAAACAT TTCTTTACAT TTGCATTCCT CCATTTCGCC | 2640 |
| AGCACAAGTC TTGCTAAATG TGATACTGTT GACATCCTCC AGAATGGCCA GAAGTGCAAT | 2700 |
| TAACCTCTTA GGTGGCAAGG AGGCAGGAAG TGCCTCTTTA GTTCTTACAT TTCTAATAGC | 2760 |
| CTTGGGTTTA TTTGCAAAGG AAGCTTGAAA AATATGAGAA AAGTTGCTTG AAGTGCATTA | 2820 |
| CAGGTGTTTG TGAAGTCACA TAATCTACGG GGCTAGGGCG AGAGAGGCCA GGGATTTGTT | 2880 |
| CACAGATACT TGAATTAATT CATCCAAATG TACTGAGGTT ACCACACACT TGACTACGGA | 2940 |
| TGTGATCAAC ACTAACAAGG AAACAAATTC AAGGACAACC TGTCTTTGAG CCAGGGCAGG | 3000 |
| CCTCAGACAC CCTGCCTGTG GCCCCGCCTC CACTTCATCC TGCCCGGAAT GCCAGTGCTC | 3060 |
| CGAGCTCAGA CAGAGGAAGC CCTGCAGAAA GTTCCATCAG GCTGTTTGCT AAAGGATGTG | 3120 |
| TGAACGGGAG ATGATGCACT GTGTTTTGAA AGTTGTCATT TTAAAGCATT TTAGCACAGT | 3180 |
| TCATAGTCCA CAGTTGATGC AGCATCCTGA GATTTTAAAT CCTGAAGTGT GGGTGGCGCA | 3240 |
| CACACCAAGT AGGGAGCTAG TCAGGCAGTT TGCTTAAGGA ACTTTTGTTC TCTGTCTCTT | 3300 |
| TTCCTTAAAA TTGGGGGTAA GGAGGGAAGG AAGAGGGAAA GAGATGACTA ACTAAAATCA | 3360 |
| TTTTTACAGC AAAAACTGCT CAAAGCCATT TAAATTATAT CCTCATTTTA AAAGTTACAT | 3420 |
| TTGCAAATAT TTCTCCCTAT GATAATGCAG TCGATAGTGT GCACTCTTTC TCTCTCTCTC | 3480 |
| TCTCTCTCAC ACACACACAC ACACACACAC ACACACACAC AGAGACACGG CACCATTCTG | 3540 |
| CCTGGGGCAC TGGAACACAT TCCTGGGGGT CACCGATGGT CAGAGTCACT AGAAGTTACC | 3600 |
| TGAGTATCTC TGGGAGGCCT CATGTCTCCT GTGGGCTTTT TACCACCACT GTGCAGGAGA | 3660 |
| ACAGACAGAG GAAATGTGTC TCCCTCCAAG GCCCCAAAGC CTCAGAGAAA GGGTGTTTCT | 3720 |
| GGTTTTGCCT TAGCAATGCA TCGGTCTCTG AGGTGACACT CTGGAGTGGT TGAAGGGCCA | 3780 |
| CAAGGTGCAG GGTTAATACT CTTGCCAGTT TTGAAATATA GATGCTATGG TTCAGATTGT | 3840 |
| TTTTAATAGA AAACTAAAGG GGCAGGGGAA GTGAAAGGAA AGATGGAGGT TTTGTGCGGC | 3900 |
| TCGATGGGGC ATTTGGAACT TCTTTTTAAA GTCATCTCAT GGTCTCCAGT TTTCAGTTGG | 3960 |
| AACTCTGGTG TTTAACACTT AAGGGAGACA AAGGCTGTGT CCATTTGGCA AAACTTCCTT | 4020 |
| GGCCACGAGA CTCTAGGTGA TGTGTGAAGC TGGGCAGTCT GTGGTGTGGA GAGCAGCCAT | 4080 |
| CTGTCTGGCC ATTCAGAGGA TTCTAAAGAC ATGGCTGGAT GCGCTGCTGA CCAACATCAG | 4140 |
| CACTTAAATA AATGCAAATG CAACATTTCT CCCTCTGGGC CTTGAAAATC CTTGCCCTTA | 4200 |
| TCATTTGGGG TGAAGGAGAC ATTTCTGTCC TTGGCTTCCC ACAGCCCCAA CGCAGTCTGT | 4260 |
| GTATGATTCC TGGGATCCAA CGAGCCCTCC TATTTTCACA GTGTTCTGAT TGCTCTCACA | 4320 |
| GCCCAGGCCC ATCGTCTGTT CTCTGAATGC AGCCCTGTTC TCAACAACAG GGAGGTCATG | 4380 |
| GAACCCCTCT GTGGAACCCA CAAGGGGAGA AATGGGTGAT AAAGAATCCA GTTCCTCAAA | 4440 |
| ACCTTCCCTG GCAGGCTGGG TCCCTCTCCT GCTGGGTGGT GCTTTCTCTT GGACACCACT | 4500 |
| CCCACCACGG GGGGAGAGCC AGCAACCCAA CCAGACAGCT CAGGTTGTGC ATCTGATGGA | 4560 |
| AACCACTGGG CTCAAACACG TGCTTTATTC TCCTGTTTAT TTTTGCTGTT ACTTTGAAGC | 4620 |
| ATGGAAATTC TTGTTTGGGG GATCTTGGGG CTACAGTAGT GGGTAAACAA ATGCCCACCG | 4680 |
| GCCAAGAGGC CATTAACAAA TCGTCCTTGT CCTGAGGGGC CCCAGCTTGC TCGGGCGTGG | 4740 |
| CACAGTGGGG AATCCAAGGG TCACAGTATG GGGAGAGGTG CACCCTGCCA CCTGCTAACT | 4800 |
| TCTCGCTAGA CACAGTGTTT CTGCCCAGGT GACCTGTTCA GCAGCAGAAC AAGCCAGGGC | 4860 |
| CATGGGGACG GGGGAAGTTT TCACTTGGAG ATGGACACCA AGACAATGAA GATTTGTTGT | 4920 |
| CCAAATAGGT CAATAATTCT GGGAGACTCT TGGAAAAAAC TGAATATATT CAGGACCAAC | 4980 |
| TCTCTCCCTC CCCTCATCCC ACATCTCAAA GCAGACAATG TAAAGAGAGA ACATCTCACA | 5040 |
| CACCCAGCTC GCCATGCCTA CTCATTCCTG AATTTCAGGT GCCATCACTG CTCTTTCTTT | 5100 |
| CTTCTTTGTC ATTTGAGAAA GGATGCAGGA GGACAATTCC CACAGATAAT CTGAGGAATG | 5160 |
| CAGAAAAACC AGGGCAGGAC AGTTATCGAC AATGCATTAG AACTTGGTGA GCATCCTCTG | 5220 |
| TAGAGGGACT CCACCCCTGC TCAACAGCTT GGCTTCCAGG CAAGACCAAC CACATCTGGT | 5280 |
| CTCTGCCTTC GGTGGCCCAC ACACCTAAGC GTCATCGTCA TTGCCATAGC ATCATGATGC | 5340 |
| AACACATCTA CGTGTAGCAC TACGACGTTA TGTTTGGGTA ATGTGGGGAT GAACTGCATG | 5400 |
| AGGCTCTGAT TAAGGATGTG GGGAAGTGGG CTGCGGTCAC TGTCGGCCTT GCAAGGCCAC | 5460 |
| CTGGAGGCCT GTCTGTTAGC CAGTGGTGGA GGAGCAAGGC TTCAGGAAGG GCCAGCCACA | 5520 |
| TGCCATCTTC CCTGCGATCA GGCAAAAAAG TGGAATTAAA AAGTCAAACC TTTATATGCA | 5580 |
| TGTGTTATGT CCATTTTGCA GGATGAACTG AGTTTAAAAG AATTTTTTTT TCTCTTCAAG | 5640 |
| TTGCTTTGTC TTTTCCATCC TCATCACAAG CCCTTGTTTG AGTGTCTTAT CCCTGAGCAA | 5700 |
| TCTTTCGATG GATGGAGATG ATCATTAGGT ACTTTTGTTT CAACCTTTAT TCCTGTAAAT | 5760 |
| ATTTCTGTGA AAACTAGGAG AACAGAGATG AGATTTGACA AAAAAAAATT GAATTAAAAA | 5820 |
| TAACACAGTC TTTTTAAAAC TAACATAGGA AAGCCTTTCC TATTATTTCT CTTCTTAGCT | 5880 |
| TCTCCATTGT CTAAATCAGG AAAACAGGAA AACACAGCTT TCTAGCAGCT GCAAAATGGT | 5940 |
| TTAATGCCCC CTACATATTT CCATCACCTT GAACAATAGC TTTAGCTTGG GAATCTGAGA | 6000 |
| TATGATCCCA GAAAACATCT GTCTCTACTT CGGCTGCAAA ACCCATGGTT TAAATCTATA | 6060 |
| TGGTTTGTGC ATTTTCTCAA CTAAAAATAG AGATGATAAT CCGAATTCTC CATATATTCA | 6120 |
| CTAATCAAAG ACACTATTTT CATACTAGAT TCCTGAGACA AATACTCACT GAAGGGCTTG | 6180 |
| TTTAAAAATA AATTGTGTTT TGGTCTGTTC TTGTAGATAA TGCCCTTCTA TTTTAGGTAG | 6240 |
| AAGCTCTGGA ATCCCTTTAT TGTGCTGTTG CTCTTATCTG CAAGGTGGCA AGCAGTTCTT | 6300 |
| TTCAGCAGAT TTTGCCCACT ATTCCTCTGA GCTGAAGTTC TTTGCATAGA TTTGGCTTAA | 6360 |
| GCTTGAATTA GATCCCTGCA AAGGCTTGCT CTGTGATGTC AGATGTAATT GTAAATGTCA | 6420 |
| GTAATCACTT CATGAATGCT AAATGAGAAT GTAAGTATTT TTAAATGTGT GTATTTCAAA | 6480 |
| TTTGTTTGAC TAATTCTGGA ATTACAAGAT TTCTATGCAG GATTTACCTT CATCCTGTGC | 6540 |
| ATGTTTCCCA AACTGTGAGG AGGGAAGGCT CAGAGATCGA GCTTCTCCTC TGAGTTCTAA | 6600 |
| CAAAATGGTG CTTTGAGGGT CAGCCTTTAG GAAGGTGCAG CTTTGTTGTC CTTTGAGCTT | 6660 |
| TCTGTTATGT GCCTATCCTA ATAAACTCTT AAACACATT | |

ACJ3 DNA sequence
Gene name: FLT1/vascular endothelial growth factor receptor
Unigene number: Hs.138671
Probeset Accession #: AA047437
Nucleic Acid Accession #: NM_002019
Coding sequence: 250-4266 (predicted start/stop codons underlined)

| | |
|---|---|
| GCGGACACTC CTCTCGGCTC CTCCCCGGCA GCGGCGGCGG CTCGGAGCGG GCTCCGGGGC | 60 |
| TCGGGTGCAG CGGCCAGCGG GCCTGGCGGC GAGGATTACC CGGGGAAGTG GTTGTCTCCT | 120 |
| GGCTGGAGCC GCGAGACGGG CGCTCAGGGC GCGGGGCCGG CGGCGGCGAA CGAGAGGACG | 180 |
| GACTCTGGCG GCCGGGTCGT TGGCCGGGGG AGCGCGGGCA CCGGGCGAGC AGGCCGCGTC | 240 |
| GCGCTCACCA TGGTCAGCTA CTGGGACACC GGGGTCCTGC TGTGCGCGCT GCTCAGCTGT | 300 |
| CTGCTTCTCA CAGGATCTAG TTCAGGTTCA AAATTAAAAG ATCCTGAACT GAGTTTAAAA | 360 |
| GGCACCCAGC ACATCATGCA AGCAGGCCAG ACACTGCATC TCCAATGCAG GGGGGAAGCA | 420 |
| GCCCATAAAT GGTCTTTGCC TGAAATGGTG AGTAAGGAAA GCGAAAGGCT GAGCATAACT | 480 |
| AAATCTGCCT GTGGAAGAAA TGGCAAACAA TTCTGCAGTA CTTTAACCTT GAACACAGCT | 540 |
| CAAGCAAACC ACACTGGCTT CTACAGCTGC AAATATCTAG CTGTACCTAC TTCAAAGAAG | 600 |
| AAGGAAACAG AATCTGCAAT CTATATATTT ATTAGTGATA CAGGTAGACC TTTCGTAGAG | 660 |
| ATGTACAGTG AAATCCCCGA AATTATACAC ATGACTGAAG GAAGGGAGCT CGTCATTCCC | 720 |
| TGCCGGGTTA CGTCACCTAA CATCACTGTT ACTTTAAAAA AGTTTCCACT TGACACTTTG | 780 |
| ATCCCTGATG GAAAACGCAT AATCTGGGAC AGTAGAAAGG GCTTCATCAT ATCAAATGCA | 840 |
| ACGTACAAAG AAATAGGGCT TCTGACCTGT GAAGCAACAG TCAATGGGCA TTTGTATAAG | 900 |
| ACAAACTATC TCACACATCG ACAAACCAAT ACAATCATAG ATGTCCAAAT AAGCACACCA | 960 |
| CGCCCAGTCA AATTACTTAG AGGCCATACT CTTGTCCTCA ATTGTACTGC TACCACTCCC | 1020 |
| TTGAACACGA GAGTTCAAAT GACCTGGAGT TACCCTGATG AAAAAAATAA GAGAGCTTCC | 1080 |
| GTAAGGCGAC GAATTGACCA AAGCAATTCC CATGCCAACA TATTCTACAG TGTTCTTACT | 1140 |
| ATTGACAAAA TGCAGAACAA AGACAAAGGA CTTTATACTT GTCGTGTAAG GAGTGGACCA | 1200 |
| TCATTCAAAT CTGTTAACAC CTCAGTGCAT ATATATGATA AAGCATTCAT CACTGTGAAA | 1260 |
| CATCGAAAAC AGCAGGTGCT TGAAACCGTA GCTGGCAAGC GGTCTTACCG GCTCTCTATG | 1320 |
| AAAGTGAAGG CATTTCCCTC GCCGGAAGTT GTATGGTTAA AAGATGGGTT ACCTGCGACT | 1380 |
| GAGAAATCTG CTCGCTATTT GACTCGTGGC TACTCGTTAA TTATCAAGGA CGTAACTGAA | 1440 |
| GAGGATGCAG GGAATTATAC AATCTTGCTG AGCATAAAAC AGTCAAATGT GTTTAAAAAC | 1500 |
| CTCACTGCCA CTCTAATTGT CAATGTGAAA CCCCAGATTT ACGAAAAGGC CGTGTCATCG | 1560 |
| TTTCCAGACC CGGCTCTCTA CCCACTGGGC AGCAGACAAA TCCTGACTTG TACCGCATAT | 1620 |
| GGTATCCCTC AACCTACAAT CAAGTGGTTC TGGCACCCCT GTAACCATAA TCATTCCGAA | 1680 |
| GCAAGGTGTG ACTTTTGTTC CAATAATGAA GAGTCCTTTA TCCTGGATGC TGACAGCAAC | 1740 |
| ATGGGAAACA GAATTGAGAG CATCACTCAG CGCATGGCAA TAATAGAAGG AAAGAATAAG | 1800 |
| ATGGCTAGCA CCTTGGTTGT GGCTGACTCT AGAATTTCTG GAATCTACAT TTGCATAGCT | 1860 |
| TCCAATAAAG TTGGGACTGT GGGAAGAAAC ATAAGCTTTT ATATCACAGA TGTGCCAAAT | 1920 |
| GGGTTTCATG TTAACTTGGA AAAAATGCCG ACGGAAGGAG AGGACCTGAA ACTGTCTTGC | 1980 |
| ACAGTTAACA AGTTCTTATA CAGAGACGTT ACTTGGATTT TACTGCGGAC AGTTAATAAC | 2040 |
| AGAACAATGC ACTACAGTAT TAGCAAGCAA AAAATGGCCA TCACTAAGGA GCACTCCATC | 2100 |
| ACTCTTAATC TTACCATCAT GAATGTTTCC CTGCAAGATT CAGGCACCTA TGCCTGCAGA | 2160 |
| GCCAGGAATG TATACACAGG GGAAGAAATC CTCCAGAAGA AAGAAATTAC AATCAGAGAT | 2220 |
| CAGGAAGCAC CATACCTCCT GCGAAACCTC AGTGATCACA CAGTGGCCAT CAGCAGTTCC | 2280 |
| ACCACTTTAG ACTGTCATGC TAATGGTGTC CCCGAGCCTC AGATCACTTG GTTTAAAAAC | 2340 |
| AACCACAAAA TACAACAAGA GCCTGGAATT ATTTTAGGAC CAGGAAGCAG CACGCTGTTT | 2400 |
| ATTGAAAGAG TCACAGAAGA GGATGAAGGT GTCTATCACT GCAAAGCCAC CAACCAGAAG | 2460 |
| GGCTCTGTGG AAAGTTCAGC ATACCTCACT GTTCAAGGAA CCTCGGACAA GTCTAATCTG | 2520 |
| GAGCTGATCA CTCTAACATG CACCTGTGTG GCTGCGACTC TCTTCTGGCT CCTATTAACC | 2580 |
| CTCCTTATCC GAAAAATGAA AAGGTCTTCT TCTGAAATAA AGACTGACTA CCTATCAATT | 2640 |
| ATAATGGACC CAGATGAAGT TCCTTTGGAT GAGCAGTGTG AGCGGCTCCC TTATGATGCC | 2700 |
| AGCAAGTGGG AGTTTGCCCG GGAGAGACTT AAACTGGGCA AATCACTTGG AAGAGGGGCT | 2760 |
| TTTGGAAAAG TGGTTCAAGC ATCAGCATTT GGCATTAAGA AATCACCTAC GTGCCGGACT | 2820 |
| GTGGCTGTGA AAATGCTGAA AGAGGGGGCC ACGGCCAGCG AGTACAAAGC TCTGATGACT | 2880 |
| GAGCTAAAAA TCTTGACCCA CATTGGCCAC CATCTGAACG TGGTTAACCT GCTGGGAGCC | 2940 |
| TGCACCAAGC AAGGAGGGCC TCTGATGGTG ATTGTTGAAT ACTGCAAATA TGGAAATCTC | 3000 |
| TCCAACTACC TCAAGAGCAA ACGTGACTTA TTTTTTCTCA ACAAGGATGC AGCACTACAC | 3060 |
| ATGGAGCCTA AGAAAGAAAA AATGGAGCCA GGCCTGGAAC AAGGCAAGAA ACCAAGACTA | 3120 |
| GATAGCGTCA CCAGCAGCGA AAGCTTTGCG AGCTCCGGCT TTCAGGAAGA TAAAAGTCTG | 3180 |
| AGTGATGTTG AGGAAGAGGA GGATTCTGAC GGTTTCTACA AGGAGCCCAT CACTATGGAA | 3240 |
| GATCTGATTT CTTACAGTTT TCAAGTGGCC AGAGGCATGG AGTTCCTGTC TTCCAGAAAG | 3300 |
| TGCATTCATC GGGACCTGGC AGCGAGAAAC ATTCTTTTAT CTGAGAACAA CGTGGTGAAG | 3360 |
| ATTTGTGATT TTGGCCTTGC CCGGGATATT TATAAGAACC CCGATTATGT GAGAAAAGGA | 3420 |
| GATACTCGAC TTCCTCTGAA ATGGATGGCT CCCGAATCTA TCTTTGACAA AATCTACAGC | 3480 |
| ACCAAGAGCG ACGTGTGGTC TTACGGAGTA TTGCTGTGGG AAATCTTCTC CTTAGGTGGG | 3540 |
| TCTCCATACC CAGGAGTACA AATGGATGAG GACTTTTGCA GTCGCCTGAG GGAAGGCATG | 3600 |
| AGGATGAGAG CTCCTGAGTA CTCTACTCCT GAAATCTATC AGATCATGCT GGACTGCTGG | 3660 |
| CACAGAGACC CAAAAGAAAG GCCAAGATTT GCAGAACTTG TGGAAAAACT AGGTGATTTG | 3720 |
| CTTCAAGCAA ATGTACAACA GGATGGTAAA GACTACATCC CAATCAATGC CATACTGACA | 3780 |
| GGAAATAGTG GGTTTACATA CTCAACTCCT GCCTTCTCTG AGGACTTCTT CAAGGAAAGT | 3840 |
| ATTTCAGCTC CGAAGTTTAA TTCAGGAAGC TCTGATGATG TCAGATATGT AAATGCTTTC | 3900 |
| AAGTTCATGA GCCTGGAAAG AATCAAAACC TTTGAAGAAC TTTTACCGAA TGCCACCTCC | 3960 |
| ATGTTTGATG ACTACCAGGG CGACAGCAGC ACTCTGTTGG CCTCTCCCAT GCTGAAGCGC | 4020 |
| TTCACCTGGA CTGACAGCAA ACCCAAGGCC TCGCTCAAGA TTGACTTGAG AGTAACCAGT | 4080 |
| AAAAGTAAGG AGTCGGGGCT GTCTGATGTC AGCAGGCCCA GTTTCTGCCA TTCCAGCTGT | 4140 |
| GGGCACGTCA GCGAAGGCAA GCGCAGGTTC ACCTACGACC ACGCTGAGCT GGAAAGGAAA | 4200 |
| ATCGCGTGCT GCTCCCCGCC CCCAGACTAC AACTCGGTGG TCCTGTACTC CACCCCACCC | 4260 |
| ATCTAGAGTT TGACACGAAG CCTTATTTCT AGAAGCACAT GTGTATTTAT ACCCCCAGGA | 4320 |
| AACTAGCTTT TGCCAGTATT ATGCATATAT AAGTTTACAC CTTTATCTTT CCATGGGAGC | 4380 |
| CAGCTGCTTT TTGTGATTTT TTTAATAGTG CTTTTTTTTT TTGACTAACA AGAATGTAAC | 4440 |
| TCCAGATAGA GAAATAGTGA CAAGTGAAGA ACACTACTGC TAAATCCTCA TGTTACTCAG | 4500 |
| TGTTAGAGAA ATCCTTCCTA AACCCAATGA CTTCCCTGCT CCAACCCCCG CCACCTCAGG | 4560 |
| GCACGCAGGA CCAGTTTGAT TGAGGAGCTG CACTGATCAC CCAATGCATC ACGTACCCCA | 4620 |
| CTGGGCCAGC CCTGCAGCCC AAAACCCAGG GCAACAAGCC CGTTAGCCCC AGGGGATCAC | 4680 |
| TGGCTGGCCT GAGCAACATC TCGGGAGTCC TCTAGCAGGC CTAAGACATG TGAGGAGGAA | 4740 |
| AAGGAAAAAA AGCAAAAAGC AAGGGAGAAA AGAGAAACCG GGAGAAGGCA TGAGAAAGAA | 4800 |
| TTTGAGACGC ACCATGTGGG CACGGAGGGG GACGGGGCTC AGCAATGCCA TTTCAGTGGC | 4860 |
| TTCCCAGCTC TGACCCTTCT ACATTTGAGG GCCCAGCCAG GAGCAGATGG ACAGCGATGA | 4920 |
| GGGGACATTT TCTGGATTCT GGGAGGCAAG AAAAGGACAA ATATCTTTTT TGGAACTAAA | 4980 |
| GCAAATTTTA GACCTTTACC TATGGAAGTG GTTCTATGTC CATTCTCATT CGTGGCATGT | 5040 |
| TTTGATTTGT AGCACTGAGG GTGGCACTCA ACTCTGAGCC CATACTTTTG GCTCCTCTAG | 5100 |
| TAAGATGCAC TGAAAACTTA GCCAGAGTTA GGTTGTCTCC AGGCCATGAT GGCCTTACAC | 5160 |
| TGAAAATGTC ACATTCTATT TTGGGTATTA ATATATAGTC CAGACACTTA ACTCAATTTC | 5220 |
| TTGGTATTAT TCTGTTTTGC ACAGTTAGTT GTGAAAGAAA GCTGAGAAGA ATGAAAATGC | 5280 |
| AGTCCTGAGG AGAGTTTTCT CCATATCAAA ACGAGGGCTG ATGGAGGAAA AAGGTCAATA | 5340 |
| AGGTCAAGGG AAGACCCCGT CTCTATACCA ACCAAACCAA TTCACCAACA CAGTTGGGAC | 5400 |
| CCAAAACACA GGAAGTCAGT CACGTTTCCT TTTCATTTAA TGGGGATTCC ACTATCTCAC | 5460 |
| ACTAATCTGA AAGGATGTGG AAGAGCATTA GCTGGCGCAT ATTAAGCACT TTAAGCTCCT | 5520 |
| TGAGTAAAAA GGTGGTATGT AATTTATGCA AGGTATTTCT CCAGTTGGGA CTCAGGATAT | 5580 |
| TAGTTAATGA GCCATCACTA GAAGAAAAGC CCATTTTCAA CTGCTTTGAA ACTTGCCTGG | 5640 |
| GGTCTGAGCA TGATGGGAAT AGGGAGACAG GGTAGGAAAG GGCGCCTACT CTTCAGGGTC | 5700 |
| TAAAGATCAA GTGGGCCTTG GATCGCTAAG CTGGCTCTGT TTGATGCTAT TTATGCAAGT | 5760 |
| TAGGGTCTAT GTATTTAGGA TGCGCCTACT CTTCAGGGTC TAAAGATCAA GTGGGCCTTG | 5820 |
| GATCGCTAAG CTGGCTCTGT TTGATGCTAT TTATGCAAGT TAGGGTCTAT GTATTTAGGA | 5880 |
| TGTCTGCACC TTCTGCAGCC AGTCAGAAGC TGGAGAGGCA ACAGTGGATT GCTGCTTCTT | 5940 |
| GGGGAGAAGA GTATGCTTCC TTTTATCCAT GTAATTTAAC TGTAGAACCT GAGCTCTAAG | 6000 |
| TAACCGAAGA ATGTATGCCT CTGTTCTTAT GTGCCACATC CTTGTTTAAA GGCTCTCTGT | 6060 |
| ATGAAGAGAT GGGACCGTCA TCAGCACATT CCCTAGTGAG CCTACTGGCT CCTGGCAGCG | 6120 |
| GCTTTTGTGG AAGACTCACT AGCCAGAAGA GAGGAGTGGG ACAGTCCTCT CCACCAAGAT | 6180 |
| CTAAATCCAA ACAAAAGCAG GCTAGAGCCA GAAGAGAGGA CAAATCTTTG TTGTTCCTCT | 6240 |
| TCTTTACACA TACGCAAACC ACCTGTGACA GCTGGCAATT TTATAAATCA GGTAACTGGA | 6300 |
| AGGAGGTTAA ACTCAGAAAA AAGAAGACCT CAGTCAATTC TCTACTTTTT TTTTTTTTTT | 6360 |
| TCCAAATCAG ATAATAGCCC AGCAAATAGT GATAACAAAT AAAACCTTAG CTGTTCATGT | 6420 |
| CTTGATTTCA ATAATTAATT CTTAATCATT AAGAGACCAT AATAAATACT CCTTTTCAAG | 6480 |
| AGAAAAGCAA AACCATTAGA ATTGTTACTC AGCTCCTTCA AACTCAGGTT TGTAGCATAC | 6540 |
| ATGAGTCCAT CCATCAGTCA AAGAATGGTT CCATCTGGAG TCTTAATGTA GAAAGAAAAA | 6600 |
| TGGAGACTTG TAATAATGAG CTAGTTACAA AGTGCTTGTT CATTAAAATA GCACTGAAAA | 6660 |
| TTGAAACATG AATTAACTGA TAATATTCCA ATCATTTGCC ATTTATGACA AAAATGGTTG | 6720 |
| GCACTAACAA AGAACGAGCA CTTCCTTTCA GAGTTTCTGA GATAATGTAC GTGGAACAGT | 6780 |
| CTGGGTGGAA TGGGGCTGAA ACCATGTGCA AGTCTGTGTC TTGTCAGTCC AAGAAGTGAC | 6840 |
| ACCGAGATGT TAATTTTAGG GACCCGTGCC TTGTTTCCTA GCCCACAAGA ATGCAAACAT | 6900 |
| CAAACAGATA CTCGCTAGCC TCATTTAAAT TGATTAAAGG AGGAGTGCAT CTTTGGCCGA | 6960 |
| CAGTGGTGTA ACTGTGTGTG TGTGTGTGTG TGTGTGTGTG TGTGTGTGTG TGTGGGTGTG | 7020 |
| GGTGTATGTG TGTTTTGTGC ATAACTATTT AAGGAAACTG GAATTTTAAA GTTACTTTTA | 7080 |
| TACAAACCAA GAATATATGC TACAGATATA AGACAGACAT GGTTTGGTCC TATATTTCTA | 7140 |
| GTCATGATGA ATGTATTTTG TATACCATCT TCATATAATA TACTTAAAAA TATTTCTTAA | 7200 |
| TTGGGATTTG TAATCGTACC AACTTAATTG ATAAACTTGG CAACTGCTTT TATGTTCTGT | 7260 |
| CTCCTTCCAT AAATTTTTCA AAATACTAAT TCAACAAAGA AAAAGCTCTT TTTTTTCCTA | 7320 |
| AAATAAACTC AAATTTATCC TTGTTTAGAG CAGAGAAAAA TTAAGAAAAA CTTTGAAATG | 7380 |
| GTCTCAAAAA ATTGCTAAAT ATTTTCAATG GAAAACTAAA TGTTAGTTTA GCTGATTGTA | 7440 |
| TGGGGTTTTC GAACCTTTCA CTTTTTGTTT GTTTTACCTA TTTCACAACT GTGTAAATTG | 7500 |
| CCAATAATTC CTGTCCATGA AAATGCAAAT TATCCAGTGT AGATATATTT GACCATCACC | 7560 |
| CTATGGATAT TGGCTAGTTT TGCCTTTATT AAGCAAATTC ATTTCAGCCT GAATGTCTGC | 7620 |
| CTATATATTC TCTGCTCTTT GTATTCTCCT TTGAACCCGT TAAAACATCC TGTGGCACTC | |

ACJ9 DNA sequence
Gene name: Purine nucleoside phosphorylase
Unigene number: Hs.75514
Probeset Accession #: K02574
Nucleic acid Accession #: X00737 cluster
Coding sequence: 110-979 (predicted start/stop codons underlined)

| | |
|---|---|
| AACTGTGCGA ACCAGACCCG GCAGCCTTGC TCAGTTCAGC ATAGCGGAGC GGATCCGATC | 60 |
| GGATCGGAGC ACACCGGAGC AGGCTCATCG AGAAGGCGTC TGCGAGACCA TGGAGAACGG | 120 |
| ATACACCTAT GAAGATTATA AGAACACTGC AGAATGGCTT CTGTCTCATA CTAAGCACCG | 180 |
| ACCTCAAGTT GCAATAATCT GTGGTTCTGG ATTAGGAGGT CTGACTGATA AATTAACTCA | 240 |
| GGCCCAGATC TTTGACTACA GTGAAATCCC CAACTTTCCT CGAAGTACAG TGCCAGGTCA | 300 |
| TGCTGGCCGA CTGGTGTTTG GGTTCCTGAA TGGCAGGGCC TGTGTGATGA TGCAGGGCAG | 360 |
| GTTCCACATG TATGAAGGGT ACCCACTCTG GAAGGTGACA TTCCCAGTGA GGGTTTTCCA | 420 |
| CCTTCTGGGT GTGGACACCC TGGTAGTCAC CAATGCAGCA GGAGGGCTGA ACCCCAAGTT | 480 |
| TGAGGTTGGA GATATCATGC TGATCCGTGA CCATATCAAC CTACCTGGTT TCAGTGGTCA | 540 |
| GAACCCTCTC AGAGGGCCCA ATGATGAAAG GTTTGGAGAT CGTTTCCCTG CCATGTCTGA | 600 |
| TGCCTACGAC CGGACTATGA GGCAGAGGGC TCTCAGTACC TGGAAACAAA TGGGGGAGCA | 660 |
| ACGTGAGCTA CAGGAAGGCA CCTATGTGAT GGTGGCAGGC CCCAGCTTTG AGACTGTGGC | 720 |
| AGAATGTCGT GTGCTGCAGA AGCTGGGAGC AGACGCTGTT GGCATGAGTA CAGTACCAGA | 780 |
| AGTTATCGTT GCACGGCACT GTGGACTTCG AGTCTTTGGC TTCTCACTCA TCACTAACAA | 840 |
| GGTCATCATG GATTATGAAA GCCTGGAGAA GGCCAACCAT GAAGAAGTCT TAGCAGCTGG | 900 |
| CAAACAAGCT GCACAGAAAT TGGAACAGTT TGTCTCCATT CTTATGGCCA GCATTCCACT | 960 |
| CCCTGACAAA GCCAGTTGAC CTGCCTTGGA GTCGTCTGGC ATCTCCCACA CAAGACCCAA | 1020 |
| GTAGCTGCTA CCTTCTTTGG CCCCTTGCTG GAGTCATGTG CCTCTGTCCT TAGGTTGTAG | 1080 |
| CAGAAAGGAA AAGATTCCTG TCCTTCACCT TTCCCACTTT CTTCTACCAG ACCCTTCTGG | 1140 |
| TGCCAGATCC TCTTCTCAAA GCTGGGATTA CAGGTGTGAG CATAGTGAGA CCTTGGCGCT | 1200 |
| ACAAAATAAA GCTGTTCTCA TTCCTGTTCT TTCTTACACA AGAGCTGGAG CCCGTGCCCT | 1260 |
| ACCACACATC TGTGGAGATG CCCAGGATTT GACTCGGGCC TTAGAACTTT GCATAGCAGC | 1320 |
| TGCTACTAGC TCTTTGAGAT AATACATTCC GAGGGGCTCA GTTCTGCCTT ATCTAAATCA | 1380 |
| CCAGAGACCA AACAAGGACT AATCCAATAC CTCTTGGA | |

ACK4 DNA sequence
Gene name: EST
Unigene number: Hs.265499
Probeset Accession #: R68763
CAT cluster#: Cluster 46668_2
Sequence: Both the EST corresponding to the probeset accession and exon
prediction; number and the CAT cluster align with the Homo sapiens BAC clone
AC009414 RP11-490M8. Using FGENESH, 2 exons predicted on this BAC clone upstream
of the probeset.
predicted exon 1: bases 5808-5837 of BAC clone AC009414

| | |
|---|---|
| AAAGTCTCGC CCAAACTTTG TTCGGCACAA CCAGCGCCGA GGGGGCGGCG CAGGCCAGGT | 60 |
| GGGAGGGGGC CCGCAGCGGG CGGCCGTACC TTCGCAAACG CCCGCTTCGT ACTCGGTGAG | 120 |
| GGAGTCGCCA TTGAGCGGGG GGCGGATGAC ACAACGCAGC CCCCGGTCGC AGGTTCCGTA | 180 |
| AATCCCGAAG GTGCCGCCGC AGCTCTCGTT CCTCTGGCTG GCGCACGTGT AGCAGCAGCC | 240 |
| GCAGACGCCC TGCACGATGC TCCCCGGGCA GTTCCTGGGC TCCTCGCACT TGGACTCGTC | 300 |
| ACAGGGCAGG CAGACCAGCG CCCGGGTGCC GGAGCGCGCC AGCAGCAGCA GCAGCCCCAG | 360 |
| CAGCGAGACC AGGAGGTGCC CGCAGCCGGC CAACCCCCTG TCCCCCGCCA CCAAGTACAT | 420 |
| CCTCCTGCGC CGCCGCCGCC TCCTCCTCGC AGCCGGGCCG GGAGCGGGGC GGGCGCCCTC | 480 |
| CCCTGCGCGG GGCACACGCG CCGCCGCCGC CGCACCAGCA GCCCGCGGTC CTCACCGCCC | 540 |
| CTCTCGGGGC CCCCGGGGCG CGCCTCCCCT CGCGGGGCGA GGCCCCCGCC CCTTCTGCGG | 600 |
| GCCGCGCCGA CCCCGAGCCC ACGAGCCTTG GCGCCGGCGG CAGCTTCCCC TCCTCCTCCT | 660 |
| CCTCCTCCTC CCGGGAGGGA GGGGGAAAAA AGAAAAAAGT TTCCTCCCGG CAGCTCCGGT | 720 |
| TCAACCCAAA CTTCTGGCGC GGCGGCGGCG GTGGCTGCTG CGCTCGGCTC CAGCCCGGGC | 780 |
| CGGCGGCGCC TCCTCCCTCT CCTCCTCCGA GTCGGCCGGC CCCGCAGCGG CGCAGCCTCC | 840 |
| GGGCCGGTCC CCGCCTCCCG AGCTGCCGAG TGGGCGCGGT GGCGCAGCAC AAGATCCGCG | 900 |
| GCGTCCGCTC CGCGCGCCCC GCTCGCCTCA CTCCTGCGCC GCTCCTCCGG GCGCTTGTTT | 960 |
| ATGGCTGGAG CCTCAGCCGC TCGGGCTGCG CCCTCCCCCA TCCTACCTCC TCCCCCAGAC | 1020 |
| CTTCCCCCCA CCCCCACGCG CCGCGCGCCG CTCATTGGCT GCCCCCCCTC CCCGGCCCGG | 1080 |
| CCGGCCCCCT CCGCCTCCCC CTCCCCCTCT CGGGCGGCCG GGCCCTTCCT CCCTCCCTCA | 1140 |
| CACGCCTCCA CCTCTTCCCG ATCTCCTCCT CCCCGAGCCC GGCGCACCGA GCCGGCCGTG | 1200 |
| CCACCGAGCT GCGGCTCTGG CCCCGGCGCC GCGGGTGCGC TGCGGATGGG CTTGGGGCGC | 1260 |
| ACCCAGCGAG CAGCGAGAGT CGCGGTGTCC CGGGCGCTCG CTGGCACCGT GGCCGCAGCG | 1320 |
| GCCGGCCTGG GAGCCAGGAG GGCGAGGCGG CTGCACCTTC GGGGCCAGAT TGGAGTTCGA | 1380 |
| AGAGTGGCGG GTACCCCAGA AGCTCGGGGC CGGGGCGATG GCTGCAGCCT CGGGAGGGTA | 1440 |
| TCGCCGGATC GAACTCCGGG AAAGGGAAGC AAAGGCATGG AACCTCCGCA CACTGGATGA | |
| predicted ACK4 gene seq (predicted start/stop codons underlined) | |
| ATGCCCCCGG AACAGCATCA TCAGCCCAAC AAAGTCTCGC CCAAACTTTG TTGGGCACAA | 60 |
| CCAGCGCCGA GGGGGCGGCG CAGGCCAGGT GGGAGGGGGC CCGCAGCGGG CGGCCGTACC | 120 |
| TTCGCAAACG CCCGCTTCGT ACTCGGTGAG GGAGTCGCCA TTGAGCGGGG GGCGGATGAC | 180 |
| ACAACGCAGC CCCCGGTCGC AGGTTCCGTA AATCCCGAAG GTGCCGCCGC AGCTCTCGTT | 240 |
| CCTCTGGCTG GCGCACGTGT AGCAGCAGCC GCAGACGCCC TGCACGATGC TCCCCGGGCA | 300 |
| GTTCCTGGGC TCCTCGCACT TGGACTCGTC ACAGGGCAGG CAGACCAGCG CCCGGGTGCC | 360 |
| GGAGCGCGCC AGCAGCAGCA GCAGCCCCAG CAGCGAGACC AGGAGGTGCC CGCAGCCGGC | 420 |
| CAACCCCCTG TCCCCCGCCA CCAAGTACAT CCTCCTGCGC CGCCGCCGCC TCCTCCTCGC | 480 |
| AGCCGGGCCG GGAGCGGGGC GGGCGCCCTC CCCTGCGCGG GGCACACGCG CCGCCGCCGC | 540 |
| CGCACCAGCA GCCCGCGGTC CTCACCGCCC CTCTCGGGGC CCCCGGGGCG CGCCTCCCCT | 600 |
| CGCGGGGCGA GGCCCCCGCC CCTTCTGCGG GCCGCGCCGA CCCCGAGCCC ACGAGCCTTG | 660 |
| GCGCCGGCGG CAGCTTCCCC TCCTCCTCCT CCTCCTCCTC CCGGGAGGGA GGGGGAAAAA | 720 |
| AGAAAAAAGT TTCCTCCCGG CAGCTCCGGT TCAACCCAAA CTTCTGGCGC GGCGGCGGCG | 780 |
| GTGGCTGCTG CGCTCGGCTC CAGCCCGGGC CGGCGGCGCC TCCTCCCTCT CCTCCTCCGA | 840 |
| GTCGGCCGGC CCCGCAGCGG CGCAGCCTCC GGGCCGGTCC CCGCCTCCCG AGCTGCCGAG | 900 |
| TGGGCGCGGT GGCGCAGCAC AAGATCCGCG GCGTCCGCTC CGCGCGCCCC GCTCGCCTCA | 960 |
| CTCCTGCGCC GCTCCTCCGG GCGCTTGTTT ATGGCTGGAG CCTCAGCCGC TCGGGCTGCG | 1020 |
| CCCTCCCCCA TCCTACCTCC TCCCCCAGAC CTTCCCCCCA CCCCCACGCG CCGCGCGCCG | 1080 |
| CTCATTGGCT GCCCCCCCTC CCCGGCCCGG CCGGCCCCCT CCGCCTCCCC CTCCCCCTCT | 1140 |
| CGGGCGGCCG GGCCCTTCCT CCCTCCCTCA CACGCCTCCA CCTCTTCCCG ATCTCCTCCT | 1200 |
| CCCCGAGCCC GGCGCACCGA GCCGGCCGTG CCACCGAGCT GCGGCTCTGG CCCCGGCGCC | 1260 |
| GCGGGTGCGC TGCGGATGGG CTTGGGGCGC ACCCAGCGAG CAGCGAGAGT CGCGGTGTCC | 1320 |
| CGGGCGCTCG CTGGCACCGT GGCCGCAGCG GCCGGCCTGG GAGCCAGGAG GGCGAGGCGG | 1380 |
| CTGCACCTTC GGGGCCAGAT TGGAGTTCGA AGAGTGGCGG GTACCCCAGA AGCTCGGGGC | 1440 |
| CGGGGCGATG GCTGCAGCCT CGGGAGGGTA TCGCCGGATC GAACTCCGGG AAAGGGAAGC | 1500 |
| AAAGGCATGG AACCTCCGCA CACTGGATGA | |

AAA8 DNA sequence
Gene name: ETL protein, with extended open reading frame
Unigene number: Hs.57958
Probeset Accession #: D58024
Nucleotide Accession #: AF192403
Coding sequence: 151-2136. Underlined sequences correspond to extended sequence
not included in AF192403.

| | |
|---|---|
| ATGAAAACAG CCGCACTCAC TCCGCCGCGC TCTCCGCCAC CGCCACCACT GCGGCCACCG | 60 |
| CCAATGAAAC GCCTCCCGCT CCTAGTGGTT TTTTCCACTT TGTTGAATTG TTCCTATACT | 120 |
| CAAAATTGCA CCAAGACACC TTGTCTCCCA AATGCAAAAT GTGAAATACG CAATGGAATT | 180 |
| GAAGCCTGCT ATTGCAACAT GGGATTTTCA GGAAATGGTG TCACAATTTG TGAAGATGAT | 240 |
| AATGAATGTG GAAATTTAAC TCAGTCCTGT GGCGAAAATG CTAATTGCAC TAACACAGAA | 300 |
| GGAAGTTATT ATTGTATGTG TGTACCTGGC TTCAGATCCA GCAGTAACCA AGACAGGTTT | 360 |
| ATCACTAATG ATGGAACCGT CTGTATAGAA AATGTGAATG CAAACTGCCA TTTAGATAAT | 420 |
| GTCTGTATAG CTGCAAATAT TAATAAAACT TTAACAAAAA TCAGATCCAT AAAAGAACCT | 480 |
| GTGGCTTTGC TACAAGAAGT CTATAGAAAT TCTGTGACAG ATCTTTCACC AACAGATATA | 540 |
| ATTACATATA TAGAAATATT AGCTGAATCA TCTTCATTAC TAGGTTACAA GAACAACACT | 600 |
| ATCTCAGCCA AGGACACCCT TTCTAACTCA ACTCTTACTG AATTTGTAAA AACCGTGAAT | 660 |
| AATTTTGTTC AAAGGGATAC ATTTGTAGTT TGGGACAAGT TATCTGTGAA TCATAGGAGA | 720 |
| ACACATCTTA CAAAACTCAT GCACACTGTT GAACAAGCTA CTTTAAGGAT ATCCCAGAGC | 780 |
| TTCCAAAAGA CCACAGAGTT TGATACAAAT TCAACGGATA TAGCTCTCAA AGTTTTCTTT | 840 |
| TTTGATTCAT ATAACATGAA ACATATTCAT CCTCATATGA ATATGGATGG AGACTACATA | 900 |
| AATATATTTC CAAAGAGAAA AGCTGCATAT GATTCAAATG GCAATGTTGC AGTTGCATTT | 960 |
| TTATATTATA AGAGTATTGG TCCTTTGCTT TCATCATCTG ACAACTTCTT ATTGAAACCT | 1020 |
| CAAAATTATG ATAATTCTGA AGAGGAGGAA AGAGTCATAT CTTCAGTAAT TTCAGTCTCA | 1080 |
| ATGAGCTCAA ACCCACCCAC ATTATATGAA CTTGAAAAAA TAACATTTAC ATTAAGTCAT | 1140 |
| CGAAAGGTCA CAGATAGGTA TAGGAGTCTA TGTGCATTTT GGAATTACTC ACCTGATACC | 1200 |
| ATGAATGGCA GCTGGTCTTC AGAGGGCTGT GAGCTGACAT ACTCAAATGA GACCCACACC | 1260 |
| TCATGCCGCT GTAATCACCT GACACATTTT GCAATTTTGA TGTCCTCTGG TCCTTCCATT | 1320 |
| GGTATTAAAG ATTATAATAT TCTTACAAGG ATCACTCAAC TAGGAATAAT TATTTCACTG | 1380 |
| ATTTGTCTTG CCATATGCAT TTTTACCTTC TGGTTCTTCA GTGAAATTCA AAGCACCAGG | 1440 |
| ACAACAATTC ACAAAAATCT TTGCTGTAGC CTATTTCTTG CTGAACTTGT TTTTCTTGTT | 1500 |
| GGGATCAATA CAAATACTAA TAAGCTCNTT TCTGTTTCAA TCATTGCCGG ACTGCTACAC | 1560 |
| TACTTCTTTT TAGCTGCTTT TGCATGGATG TGCATTGAAG GCATACATCT CTATCTCATT | 1620 |
| GTTGTGGGTG TCATCTACAA CAAGGGATTT TTGCACAAGA ATTTTTATAT CTTTGGCTAT | 1680 |
| CTAAGCCCAG CCGTGGTAGT TGGATTTTCG GCAGCACTAG GATACAGATA TTATGGCACA | 1740 |
| ACAAAAGTAT GTTGGCTTAG CACCGAAACA CACTTTATTT GGAGTTTTAT AGGACCAGCA | 1800 |
| TGCCTAATCA TTCTTGTTAA TCTCTTGGCT TTTGGAGTCA TCATATACAA AGTTTTTCGT | 1860 |
| CACACTGCAG GGTTGAAACC AGAAGTTAGT TGCTTTGAGA ACATAAGGTC TTGTGCAAGA | 1920 |
| GGAGCCCTCG CTCTTCTGTT CCTTCTCGGC ACCACCTGGA TCTTTGGGGT TCTCCATGTT | 1980 |
| GTGCACGCAT CAGTGGTTAC AGCTTACCTC TTCACAGTCA GCAATGCTTT CCAGGGGATG | 2040 |
| TTCATTTTTT TATTCCTGTG TGTTTTATCT AGAAAGATTC AAGAAGAATA TTACAGATTG | 2100 |
| TTCAAAAATG TCCCCTGTTG TTTTGGATGT TTAAGGTAAA CATAGAGAAT GGTGGATAAT | 2160 |
| TACAACTGCA CTAAAAATAA AAATTCCAAG CTGTGGATGA CCAATGTATA AAAATGACTC | 2220 |
| ATCAAATTAT CCAATTATTA ACTACTAGAC AAAAAGTATT TTAAATCAGT TTTTCTGTTT | 2280 |
| ATGCTATAGG AACTGTAGAT AATAAGGTAA AATTATGTAT CATATAGATA TACTATGTTT | 2340 |
| TTCTATGTGA AATAGTTCTG TCAAAAATAG TATTGCAGAT ATTTGGAAAG TAATTGGTTT | 2400 |
| CTCAGGAGTG ATATCACTGC ACCCAAGGAA AGATTTTCTT TCTAACACGA GAAGTATATG | 2460 |
| AATGTCCTGA AGGAAACCAC TGGCTTGATA TTTCTGTGAC TCGTGTTGCC TTTGAAACTA | 2520 |
| GTCCCCTACC ACCTCGGTAA TGAGCTCCAT TACAGAAAGT GGAACATAAG AGAATGAAGG | 2580 |
| GGCAGAATAT CAAACAGTGA AAAGGGAATG ATAAGATGTA TTTTGAATGA ACTGTTTTTT | 2640 |
| CTGTAGACTA GCTGAGAAAT TGTTGACATA AAATAAAGAA TTGAAGAAAC ACATTTTACC | 2700 |
| ATTTTGTGAA TTGTTCTGAA CTTAAATGTC CACTAAAACA ACTTAGACTT CTGTTTGCTA | 2760 |
| AATCTGTTTC TTTTTCTAAT ATTCTAAAAA AAAAAAAAAG GTTTMCCYCC CAAATTGAAA | 2820 |
| AAAAAAGGGA AAAAAAAATC TGTTTCTAAG GTTAGACTGA GATATATACT ATTTCCTTAC | 2880 |
| TTATTTCACA GATTGTGACT TTGGATAGTT AATCAGTAAA ATATAAATGT GTCGA | |

AAC6 DNA sequence
Gene name: Homo sapiens cDNA FLJ13465 fis, clone PLACE1003493, weakly similar to
endothelial cell multimerin precursor
Unigene number: Hs.134797
Probeset Accession #: AA025351
Nucleotide Accession #: AK023527
Coding sequence: predicted 75-2921
Extended sequence: 729-3465 (underlined sequence)

| | |
|---|---|
| AAGACAACGT CACTAGCAGT TTCTGGAGCT ACTTGCCAAG GCTGAGTGTG AGCTGAGCCT | 60 |
| GCCCCACCAC CAAGATGATC CTGAGCTTGC TGTTCAGCCT TGGGGGCCCC CTGGGCTGGG | 120 |
| GGCTGCTGGG GGCATGGGCC CAGGCTTCCA GTACTAGCCT CTCTGATCTG CAGAGCTCCA | 180 |
| GGACACCTGG GGTCTGGAAG GCAGAGGCTG AGGACACCAG CAAGGACCCC GTTGGACGTA | 240 |
| ACTGGTGCCC CTACCCAATG TCCAAGCTGG TCACCTTACT AGCTCTTTGC AAAACAGAGA | 300 |
| AATTCCTCAT CCACTCGCAG CAGCCGTGTC CGCAGGGAGC TCCAGACTGC CAGAAAGTCA | 360 |
| AAGTCATGTA CCGCATGGCC CACAAGCCAG TGTACCAGGT CAAGCAGAAG GTGCTGACCT | 420 |
| CTTTGGCCTG GAGGTGCTGC CCTGGCTACA CGGGCCCCAA CTGCGAGCAC CACGATTCCA | 480 |
| TGGCAATCCC TGAGCCTGCA GATCCTGGTG ACAGCCACCA GGAACCTCAG GATGGACCAG | 540 |
| TCAGCTTCAA ACCTGGCCAC CTTGCTGCAG TGATCAATGA GGTTGAGGTG CAACAGGAAC | 600 |
| AGCAGGAACA TCTGCTGGGA GATCTCCAGA ATGATGTGCA CCGGGTGGCA GACAGCCTGC | 660 |
| CAGGCCTGTG GAAAGCCCTG CCTGGTAACC TCACAGCTGC AGTGATGGAA GCAAATCAAA | 720 |
| CAGGGCACGA GTTCCCTGAT AGATCCTTGG AGCAGGTGCT GCTACCCCAC GTGGACACCT | 780 |
| TCCTACAAGT GCATTTCAGC CCCATCTGGA GGAGCTTTAA CCAAAGCCTG CACAGCCTTA | 840 |
| CCCAGGCCAT AAGAAACCTG TCTCTTGACG TGGAGGCCAA CCGCCAGGCC ATCTCCAGAG | 900 |
| TCCAGGACAG TGCCGTGGCC AGGGCTGACT TCCAGGAGCT TGGTGCCAAA TTTGAGGCCA | 960 |
| AGGTCCAGGA GAACACTCAG AGAGTGGGTC AGCTGCGACA GGACGTGGAG GACCGCCTGC | 1020 |
| ACGCCCAGCA CTTTACCCTG CACCGCTCGA TCTCAGAGCT CCAAGCCGAT GTGGACACCA | 1080 |
| AATTGAAGAG GCTGCACAAG GCTCAGGAGG CCCCAGGGAC CAATGGCAGT CTGGTGTTGG | 1140 |
| CAACGCCTGG GGCTGGGGCA AGGCCTGAGC CGGACAGCCT GCAGGCCAGG CTGGGCCAGC | 1200 |
| TGCAGAGGAA CCTCTCAGAG CTGCACATGA CCACGGCCCG CAGGGAGGAG GAGTTGCAGT | 1260 |
| ACACCCTGGA GGACATGAGG GCCACCCTGA CCCGGCACGT GGATGAGATC AAGGAACTGT | 1320 |
| ACTCCGAATC GGACGAGACT TTCGATCAGA TTAGCAAGGT GGAGCGGCAG GTGGAGGAGC | 1380 |
| TGCAGGTGAA CCACACGGCG CTCCGTGAGC TGCGCGTGAT CCTGATGGAG AAGTCTCTGA | 1440 |
| TCATGGAGGA GAACAAGGAG GAGGTGGAGC GGCAGCTCCT GGAGCTCAAC CTCACGCTGC | 1500 |
| AGCACCTGCA GGGTGGCCAT GCCGACCTCA TCAAGTACGT GAAGGACTGC AATTGCCAGA | 1560 |
| AGCTCTATTT AGACCTGGAC GTCATCCGGG AGGGCCAGAG GGACGCCACG CGTGCCCTGG | 1620 |
| AGGAGACCCA GGTGAGCCTG GACGAGCGGC GGCAGCTGGA CGGCTCCTCC CTGCAGGCCC | 1680 |
| TGCAGAACGC CGTGGACGCC GTGTCGCTGG CCGTGGACGC GCACAAAGCG GAGGGCGAGC | 1740 |
| GGGCGCGGGC GGCCACGTCG CGGCTCCGGA GCCAAGTGCA GGCGCTGGAT GACGAGGTGG | 1800 |
| GCGCGCTGAA GGCGGCCGCG GCCGAGGCCC GCCACGAGGT GCGCCAGCTG CACAGCGCCT | 1860 |
| TCGCCGCCCT GCTGGAGGAC GCGCTGCGGC ACGAGGCGGT GCTGGCCGCG CTCTTCGGGG | 1920 |
| AGGAGGTGCT GGAGGAGATG TCTGAGCAGA CGCCGGGACC GCTGCCCCTG AGCTACGAGC | 1980 |
| AGATCCGCGT GGCCCTGCAG GACGCCGCTA GCGGGCTGCA GGAGCAGGCG CTCGGCTGGG | 2040 |
| ACGAGCTGGC CGCCCGAGTG ACGGCCCTGG AGCAGGCCTC GGAGCCCCCG CGGCCGGCAG | 2100 |
| AGCACCTGGA GCCCAGCCAC GACGCGGGCC GCGAGGAGGC CGCCACCACC GCCCTGGCCG | 2160 |
| GGCTGGCGCG GGAGCTCCAG AGCCTGAGCA ACGACGTCAA GAATGTCGGG CGGTGCTGCG | 2220 |
| AGGCYGAGGC CGGGGCCGGG GCCGCCTCCC TCAACGCCTC CCTTGACGGC CTCCACAACG | 2280 |
| CACTCTTCGC CACTCAGCGC AGCTTGGAGC AGCACCAGCG GCTCTTCCAC AGCCTCTTTG | 2340 |
| GGAACTTCCA AGGGCTCATG GAAGCCAACG TCAGCCTGGA CCTGGGGAAG CTGCAGACCA | 2400 |
| TGCTGAGCAG GAAAGGGAAA AAGCAGCAGA AAGACCTGGA AGCTCCCCGG AAGAGGGACA | 2460 |
| AGAAGGAAGC GGAGCCTTTC GTGGACATAC GGGTCACAGG GCCTGTGCCA GGTGCCTTGG | 2520 |
| GCGCGGCGCT CTGGGAGGCA GRWTCCCCTG TGGCCTTCTA TGCCAGCTTT TCAGAAGGGA | 2580 |
| CGGCTGCCCT GCAGACAGTG AAGTTCAACA CCACATACAT CAACATTGGC AGCAGCTACT | 2640 |
| TCCCTGAACA TGGCTACTTC CGAGCCCCTG AGCGTGGTGT CTACCTGTTT GCAGTGAGCG | 2700 |
| TTGAATTTGG CCCAGGGCCA GGCACCGGGC AGCTGGTGTT TGGAGGTCAC CATCGGACTC | 2760 |
| CAGTCTGTAC CACTGGGCAG GGGAGTGGAA GCACAGCAAC GGTCTTTGCC ATGGCTGAGC | 2820 |
| TGCAGAAGGG TGAGCGAGTA TGGTTTGAGT TAACCCAGGG ATCAATAACA AAGAGAAGCC | 2880 |
| TGTCGGGCAC TGCATTTGGG GGCTTCCTGA TGTTTAAGAC CTGAACCCCA GCCCCAATCT | 2940 |
| GATCAGACAT CATGGACTCG CCCAGCTCTC CTCGGCCTGG GGCTCTGGCC AAGGATGGGC | 3000 |
| TGGAGGTCAT TCAGTTGGTC TGTCTCTTCC CTGGAAACCT TCTGCAAAGA TGGTGTGGTG | 3060 |
| TACGTGGCTT CCCTGTAACC ACATGGGGCT TGGCCATTTC TCCATGATGA GAAGGACTGG | 3120 |
| AATGCTTCTC CGGGCAGGAC ATGGTCCTAG GAAGCCTGAA CCTTGGCTTG GCATGCCTTC | 3180 |
| TCAGACAGCA CGGCCTGGGC TCCAACTCTT CACCACACCC TGTATTCTAC AACTTCTTTG | 3240 |
| GTGTTTTGCT CCTCCTGTGG TTGGAAACTT CTGTACAACA CTTTAAACTT TTCTCTTGCT | 3300 |
| TCCTCTTCTC TTCTCCCTTA TCGTATGATA GAAAGACATT CTTCCCCAGG AGGAATGTTT | 3360 |
| AAAATGGAGG CAACATTTTG GCCAACATTG GAAAGCACTA GAGGGCAATG GGATTAAACC | 3420 |
| AACCTGCTTG GTCTCTATTA GTCAGTAATG AAGACGACAG CCTGGCCAAC CAAGGGAAAC | 3480 |
| TCTGATGATT TTATAAGTTT GATAGTTCCT CCTGTGTTCA TTCTCCTTCC TGCCACCTTG | 3720 |
| TGAAGATGCC TTGGTTCCTC TTCACTGTCT GCCATGATTG TAAGTTTCCT GAGGCCTCCC | 3780 |
| CAGCCATGTG GAACAGTGAG TCAATTAAAC CTCTTTCCTT TATAAATT | |

| | |
|---|---|
| ACH7 DNA sequence | |
| Gene name: ESTs | |
| Unigene number: Hs.3807 | |
| Probeset Accession #: AA292694 | |
| BAC Accession #: | ALI161751 |
| FGENESH predicted exons: FGENESH predicts 2 exons on the minus strand of AL161751 | |
| upstream of the ACH7 probeset. | |
| FGENESH predicted exon 1: | |

| | |
|---|---|
| ATGGGCAAAG ACTTCATGAC TAAAACACCA AAAGCATTTG CAACAAAAGC CAAAATTGAC | 60 |
| AAATGGGATC TAATTAAACT AAAGAGCTTC TGCACAGCAA AAGAAACTAT CATCAGAGTG | 120 |
| AACAGTCAAC CTACAGACTG GCAGAAAACT TTTGCAATCT ATCCATCTGA CAAAGGGGTA | 180 |
| ATAGCCAGAA TCTACAAGGA GCTTGAACAA ATTTATAAGA AAAAAAAACC AACAAAAA | |
| FGENESH predicted exon 2: | |
| CGCTCCGCAC ACATTTCCTG TCGCGGCCTA AGGGAAACTG TTGGCCGCTG GGCCCGCGGG | 60 |
| GGGATTCTTG GCAGTTGGGG GGTCCGTCGG GAGCGAGGGC GGAGGGGAAG GGAGGGGGAA | 120 |
| CCGGGTTGGG GAAGCCAGCT GTAGAGGGCG GTGACCGCGC TCCAGACACA GCTCTGCGTC | 180 |
| CTCGAGCGGG ACAGATCCAA GTTGGGAGCA GCTCTGCGTG CGGGGCCTCA GAGAATGAGG | 240 |
| CCGGCGTTCG CCCTGTGCCT CCTCTGGCAG GCGCTCTGGC CCGGGCCGGG CGGCGGCGAA | 300 |
| CACCCCACTG CCGACCGTGC TGGCTGCTCG GCCTCGGGGG CCTGCTACAG CCTGCACCAC | 360 |
| GCTACCATGA AGCGGCAGGC GGCCGAGGAG GCCTGCATCC TGCGAGGTGG GGCGCTCAGC | 420 |
| ACCGTGCGTG CGGGCGCCGA GCTGCGCGCT GTGCTCGCGC TCCTGCGGGC AGGCCCAGGG | 480 |
| CCCGGAGGGG GCTCCAAAGA CCTGCTGTTC TGGGTCGCAC TGGAGCGCAG GCGTTCCCAC | 540 |
| TGCACCCTGG AGAACGAGCC TTTGCGGGGT TTCTCCTGGC TGTCCTCCGA CCCCGGCGGT | 600 |
| CTCGAAAGCG ACACGCTGCA GTGGGTGGAG GAGCCCCAAC GCTCCTGCAC CGCGCGGAGA | 660 |
| TGCGCGGTAC TCCAGGCCAC CGGTGGGGTC GAGCCCGCAG CTGGAAGGAG ATGCGATGCC | 720 |
| ACCTGCGCGC CAACGGCTAC CTGTGCAAGT ACCAGTTTGA GGTCTTGTGT CCTGCGCCGC | 780 |
| GCCCCGGGGC CGCCTCTAAC TTGAGCTATC GCGCGCCCTT CCAGCTGCAC AGCGCCGCTC | 840 |
| TGGACTTGAG TCCACCTGGG ACCGAGGTGA GTGCGCTCTG CCGGGGACAG CTCCCGATCT | 900 |
| CAGTTACTTG CATCGCGGAC GAAATCGGCG CTCGCTGGGA CAAACTCTCG GGCGATGTGT | 960 |
| TGTGTCCCTG CCCCGGGAGG TACCTCCGTG CTGGCAAATG CGCAGAGCTC CCTAACTGCC | 1020 |
| TAGACGACTT GGGAGGCTTT GCCTGCGAAT GTGCTACGGG CTTCGAGCTG GGGAAGGACG | 1080 |
| GCCGCTCTTG TGTGACCAGT GGGGAAGGAC AGCCGACCCT TGGGGGGACC GGGGTGCCCA | 1140 |
| CCAGGCGCCC GCCGGCCACT GCAACCAGCC CCGTGCCGCA GAGAACATGG CCAATCAGGG | 1200 |
| TCGACGAGAA GCTGGGAGAG ACACCACTTG TCCCTGAACA AGACAATTCA GTAACATCTA | 1260 |
| TTCCTGAGAT TCCTCGATGG GGATCACAGA GCACGATGTC TACCCTTCAA ATGTCCCTTC | 1320 |
| AAGCCGAGTC AAAGGCCACT ATCACCCCAT CAGGGAGCGT GATTTCCAAG TTTAATTCTA | 1380 |
| CGACTTCCTC TGCCACTCCT CAGGCTTTCG ACTCCTCCTC TGCCGTGGTC TTCATATTTG | 1440 |
| TGAGCACAGC AGTAGTAGTG TTGGTGATCT TGACCATGAC AGTACTGGGG CTTGTCAAGC | 1500 |
| TCTGCTTTCA CGAAAGCCCC TCTTCCCAGC CAAGGAAGGA GTCTATGGGC CCGCCGGGCC | 1560 |
| TGGAGAGTGA TCCTGAGCCC GCTGCTTTGG GCTCCAGTTC TGCACATTGC ACAAACAATG | 1620 |
| GGGTGAAAGT CGGGGACTGT GATCTGCGGG ACAGAGCAGA AGGTGCCTTG CTGGCGGAGT | 1680 |
| CCCCTCTTGG CTCTAGTGAT GCATAG | |

ACH7 predicted coding seq (predicted start/stop codons underlined)

| | |
|---|---|
| ATGGGCAAAG ACTTCATGAC TAAAACACCA AAAGCATTTG CAACAAAAGC CAAAATTGAC | 60 |
| AAATGGGATC TAATTAAACT AAAGAGCTTC TGCACAGCAA AAGAAACTAT CATCAGAGTG | 120 |
| AACAGTCAAC CTACAGACTG GCAGAAAACT TTTGCAATCT ATCCATCTGA CAAAGGGGTA | 180 |
| ATAGCCAGAA TCTACAAGGA GCTTGAACAA ATTTATAAGA AAAAAAAACC AACAAAAACG | 240 |
| CTCCGCACAC ATTTCCTGTC GCGGCCTAAG GGAAACTGTT GGCCGCTGGG CCCGCGGGGG | 300 |
| GATTCTTGGC AGTTGGGGGG TCCGTCGGGA GCGAGGGCGG AGGGGAAGGG AGGGGGAACC | 360 |
| GGGTTGGGGA AGCCAGCTGT AGAGGGCGGT GACCGCGCTC CAGACACAGC TCTGCGTCCT | 420 |
| CGAGCGGGAC AGATCCAAGT TGGGAGCAGC TCTGCGTGCG GGGCCTCAGA GAATGAGGCC | 480 |
| GGCGTTCGCC CTGTGCCTCC TCTGGCAGGC GCTCTGGCCC GGGCCGGGCG GCGGCGAACA | 540 |
| CCCCACTGCC GACCGTGCTG GCTGCTCGGC CTCGGGGGCC TGCTACAGCC TGCACCACGC | 600 |
| TACCATGAAG CGGCAGGCGG CCGAGGAGGC CTGCATCCTG CGAGGTGGGG CGCTCAGCAC | 660 |
| CGTGCGTGCG GGCGCCGAGC TGCGCGCTGT GCTCGCGCTC CTGCGGGCAG GCCCAGGGCC | 720 |
| CGGAGGGGGC TCCAAAGACC TGCTGTTCTG GGTCGCACTG GAGCGCAGGC GTTCCCACTG | 780 |
| CACCCTGGAG AACGAGCCTT TGCGGGGTTT CTCCTGGCTG TCCTCCGACC CCGGCGGTCT | 840 |
| CGAAAGCGAC ACGCTGCAGT GGGTGGAGGA GCCCCAACGC TCCTGCACCG CGCGGAGATG | 900 |
| CGCGGTACTC CAGGCCACCG GTGGGGTCGA GCCCGCAGCT GGAAGGAGAT GCGATGCCAC | 960 |
| CTGCGCGCCA ACGGCTACCT GTGCAAGTAC CAGTTTGAGG TCTTGTGTCC TGCGCCGCGC | 1020 |
| CCCGGGGCCG CCTCTAACTT GAGCTATCGC GCGCCCTTCC AGCTGCACAG CGCCGCTCTG | 1080 |
| GACTTCAGTC CACCTGGGAC CGAGGTGAGT GCGCTCTGCC GGGGACAGCT CCCGATCTCA | 1140 |
| GTTACTTGCA TCGCGGACGA AATCGGCGCT CGCTGGGACA AACTCTCGGG CGATGTGTTG | 1200 |
| TGTCCCTGCC CCGGGAGGTA CCTCCGTGCT GGCAAATGCG CAGAGCTCCC TAACTGCCTA | 1260 |
| GACGACTTGG GAGGCTTTGC CTGCGAATGT GCTACGGGCT TCGAGCTGGG GAAGGACGGC | 1320 |
| CGCTCTTGTG TGACCAGTGG GGAAGGACAG CCGACCCTTG GGGGGACCGG GGTGCCCACC | 1380 |
| AGGCGCCCGC CGGCCACTGC AACCAGCCCC GTGCCGCAGA GAACATGGCC AATCAGGGTC | 1440 |
| GACGAGAAGC TGGGAGAGAC ACCACTTGTC CCTGAACAAG ACAATTCAGT AACATCTATT | 1500 |
| CCTGAGATTC CTCGATGGGG ATCACAGAGC ACGATGTCTA CCCTTCAAAT GTCCCTTCAA | 1560 |
| GCCGAGTCAA AGGCCACTAT CACCCCATCA GGGAGCGTGA TTTCCAAGTT TAATTCTACG | 1620 |
| ACTTCCTCTG CCACTCCTCA GGCTTTCGAC TCCTCCTCTG CCGTGGTCTT CATATTTGTG | 1680 |
| AGCACAGCAG TAGTAGTGTT GGTGATCTTG ACCATGACAG TACTGGGGCT TGTCAAGCTC | 1740 |
| TGCTTTCACG AAAGCCCCTC TTCCCAGCCA AGGAAGGAGT CTATGGGCCC GCCGGGCCTG | 1800 |
| GAGAGTGATC CTGAGCCCGC TGCTTTGGGC TCCAGTTCTG CACATTGCAC AAACAATGGG | 1860 |
| GTGAAAGTCG GGGACTGTGA TCTGCGGGAC AGAGCAGAGG GTGCCTTGCT GGCGGAGTCC | 1920 |
| CCTCTTGGCT CTAGTGATGC ATAG | |

AAD3 DNA sequence
Gene name: ESTs
Unigene number: Hs.17404
Probeset Accession #: N39584
Nucleic Acid Accession #: N39584
Coding sequence: no identified ORF; possible frameshifts

| | |
|---|---|
| AAATGGGATT GAGTTAAAAC TATTTTATTT TAAATATACA TTTTAAAGCA GTTCTTTTTT | 60 |
| TTTTTTTTTT TTTTATTATA CACACACTTC AAGAGAATAT GCACAGTCTA GGCCGGGCAC | 120 |
| GGTGGCTCAC GCCTGTAATC CCAGCACTTT GGGAGGCCGA GGCATGTGGA TCACCTGAGG | 180 |
| TCAGGAGTTT GAGACCAGCC TAGACAACAT GGTGAAACCT TGTCTCTATG AAAAATACAA | 240 |
| AATTTGCTGG GAGTGGTGGT GCATGCCTGT AATCCCAGCT ACTTGGAAGG CTGAGGCAGG | 300 |
| AGAATGTCTT GAACCTAGGA GGTGGAGGTT GCAGTGAGCT GAGATTGCAC CATTGCACTC | 360 |
| CAGCCTGTGC AACAAAAGTG AAACTCCATT TCAAGAAAAA AAAAAAAAAA AGAATATGCA | 420 |
| CAGTCTGAAT GTATACCAGG AGTGTGAGAG ACACATGCCC ACTTCATGCA ACTCCTAAAC | 480 |
| TCAAAGTCTA AATCAGATAT TTTTATTAAC AATGACAACT TGTTGCCAAC TCCCTGTTTC | 540 |
| TAATCACCAA AGACCCAGGG TACCTAAAAG GACTTTGCAA CCAAGCAAAG TCACTGTCTT | 600 |
| CAAATCTGGA TACACACTTT CCCCTCTGTA GATTCAAAAG GTGCTTCCTT CCCGGCTGTC | 660 |
| TCCAGCTTCC TTACTCTCTT TTCTGGGATT TCTTTTTCTT CTTTCTTTCT GGCTCTTCCT | 720 |
| CCACTGGCTG AACTGGGTCC CCTAACTGAA ACAGCCCCTG ACTTAGCCCA AGCATGCTTC | 780 |
| CTTTAGCTGC TGTGAGAATT TTGTCTTCCT CACCAGCCAG GTCCTCAAGG CAAAGTCCTC | 840 |
| AGCCAGTGCT TTAAGAGCAA CTTCCCGCAA ATCAGAAACT CACTGTGATT CCAAAAATGT | 900 |
| TTCTGAGCCC TGGACCCCTG CCCCCAAAAT ATTTTCATCT TTCCCCCAAA CCTCCTTTAA | 960 |
| AGGAGCATGC ATAACAGTGT GCTGAAAGAC AGTTGTTGGT TTTTTGATTT TAGCATATTA | 1020 |
| TTTCCTGTAT GAAATATGTT TTATATAATC TCCTATTATT TTTATCTTAT GTTTTGTATT | 1080 |
| GTTGATAAAT CCCTTTTTGT CCTTCTAAGA TGTTCTATTG TAAAATCACT TATAAGGTAT | 1140 |
| GATTACTCTT TATGCTATTA CTTTATATGC CATTTGGGTA ATAAATAGTA AATGGTTGAT | 1200 |
| GATATGATTG ACTGATGCGC AGTCCAGAGC ATGTATGAAT AATCTCATAA AACAGTATCA | 1260 |
| CAGACATTAA GCTAAACTGT TTCGTTTTTT TGAAAGAACA ACTCATACTT TGGAACAGTT | 1320 |
| GTCAATATTA ATTTGTTGCA AATATTTAAT TTAAATAAAC ATTTTTGTAC CATGAAAAAA | 1380 |

AAD4 DNA sequence
Gene name: ERG
Unigene number: Hs.279477 / Hs.45514
Probeset Accession #: R32894
Nucleic Acid Accession #: M17254
Coding sequence: 257-1645 (predicted start/stop codons underlined)

| | |
|---|---|
| GTCCGCGCGT GTCCGCGCCC GCGTGTGCCA GCGCGCGTGC CTTGGCCGTG CGCGCCGAGC | 60 |
| CGGGTCGCAC TAACTCCCTC GGCGCCGACG GCGGCGCTAA CCTCTCGGTT ATTCCAGGAT | 120 |
| CTTTGGAGAC CCGAGGAAAG CCGTGTTGAC CAAAAGCAAG ACAAATGACT CACAGAGAAA | 180 |
| AAAGATGGCA GAACCAAGGG CAACTAAAGC CGTCAGGTTC TGAACAGCTG GTAGATGGGC | 240 |
| TGGCTTACTG AAGGACATGA TTCAGACTGT CCCGGACCCA GCAGCTCATA TCAAGGAAGC | 300 |
| CTTATCAGTT GTGAGTGAGG ACCAGTCGTT GTTTGAGTGT GCCTACGGAA CGCCACACCT | 360 |
| GGCTAAGACA GAGATGACCG CGTCCTCCTC CAGCGACTAT GGACAGACTT CCAAGATGAG | 420 |
| CCCACGCGTC CCTCAGCAGG ATTGGCTGTC TCAACCCCCA GCCAGGGTCA CCATCAAAAT | 480 |
| GGAATGTAAC CCTAGCCAGG TGAATGGCTC AAGGAACTCT CCTGATGAAT GCAGTGTGGC | 540 |
| CAAAGGCGGG AAGATGGTGG GCAGCCCAGA CACCGTTGGG ATGAACTACG GCAGCTACAT | 600 |
| GGAGGAGAAG CACATGCCAC CCCCAAACAT GACCACGAAC GAGCGCAGAG TTATCGTGCC | 660 |
| AGCAGATCCT ACGCTATGGA GTACAGACCA TGTGCGGCAG TGGCTGGAGT GGGCGGTGAA | 720 |
| AGAATATGGC CTTCCAGACG TCAACATCTT GTTATTCCAG AACATCGATG GGAAGGAACT | 780 |
| GTGCAAGATG ACCAAGGACG ACTTCCAGAG GCTCACCCCC AGCTACAACG CCGACATCCT | 840 |
| TCTCTCACAT CTCCACTACC TCAGAGAGAC TCCTCTTCCA CATTTGACTT CAGATGATGT | 900 |
| TGATAAAGCC TTACAAAACT CTCCACGGTT AATGCATGCT AGAAACACAG ATTTACCATA | 960 |
| TGAGCCCCCC AGGAGATCAG CCTGGACCGG TCACGGCCAC CCCACGCCCC AGTCGAAAGC | 1020 |
| TGCTCAACCA TCTCCTTCCA CAGTGCCCAA AACTGAAGAC CAGCGTCCTC AGTTAGATCC | 1080 |
| TTATCAGATT CTTGGACCAA CAAGTAGCCG CCTTGCAAAT CCAGGCAGTG GCCAGATCCA | 1140 |
| GCTTTGGCAG TTCCTCCTGG AGCTCCTGTC GGACAGCTCC AACTCCAGCT GCATCACCTG | 1200 |
| GGAAGGCACC AACGGGGAGT TCAAGATGAC GGATCCCGAC GAGGTGGCCC GGCGCTGGGG | 1260 |
| AGAGCGGAAG AGCAAACCCA ACATGAACTA CGATAAGCTC AGCCGCGCCC TCCGTTACTA | 1320 |
| CTATGACAAG AACATCATGA CCAAGGTCCA TGGGAAGCGC TACGCCTACA AGTTCGACTT | 1380 |
| CCACGGGATC GCCCAGGCCC TCCAGCCCCA CCCCCCGGAG TCATCTCTGT ACAAGTACCC | 1440 |
| CTCAGACCTC CCGTACATGG GCTCCTATCA CGCCCACCCA CAGAAGATGA ACTTTGTGGC | 1500 |
| GCCCCACCCT CCAGCCCTCC CCGTGACATC TTCCAGTTTT TTTGCTGCCC CAAACCCATA | 1560 |
| CTGGAATTCA CCAACTGGGG GTATATACCC CAACACTAGG CTCCCCACCA GCCATATGCC | 1620 |
| TTCTCATCTG GGCACTTACT ACTAAAGACC TGGCGGAGGC TTTTCCCATC AGCGTGCATT | 1680 |
| CACCAGCCCA TCGCCACAAA CTCTATCGGA GAACATGAAT CAAAAGTGCC TCAAGAGGAA | 1740 |
| TGAAAAAAGC TTTACTGGGG CTGGGGAAGG AAGCCGGGGA AGAGATCCAA AGACTCTTGG | 1800 |
| GAGGGAGTTA CTGAAGTCTT ACTACAGAAA TGAGGAGGAT GCTAAAAATG TCACGAATAT | 1860 |
| GGACATATCA TCTGTGGACT GACCTTGTAA AAGACAGTGT ATGTAGAAGC ATGAAGTCTT | 1920 |
| AAGGACAAAG TGCCAAAGAA AGTGGTCTTA AGAAATGTAT AAACTTTAGA GTAGAGTTTG | 1980 |
| AATCCCACTA ATGCAAACTG GGATGAAACT AAAGCAATAG AAACAACACA GTTTTGACCT | 2040 |
| AACATACCGT TTATAATGCC ATTTTAAGGA AAACTACCTG TATTTAAAAA TAGTTTCATA | 2100 |
| TCAAAAACAA GAGAAAAGAC ACGAGAGAGA CTGTGGCCCA TCAACAGACG TTGATATGCA | 2160 |
| ACTGCATGGC ATGTGCTGTT TTGGTTGAAA TCAAATACAT TCCGTTTGAT GGACAGCTGT | 2220 |
| CAGCTTTCTC AAACTGTGAA GATGACCCAA AGTTTCCAAC TCCTTTACAG TATTACCGGG | 2280 |
| ACTATGAACT AAAAGGTGGG ACTGAGGATG TGTATAGAGT GAGCGTGTGA TTGTAGACAG | 2340 |
| AGGGGTGAAG AAGGAGGAGG AAGAGGCAGA GAAGGAGGAG ACCAGGCTGG GAAAGAAACT | 2400 |
| TCTCAAGCAA TGAAGACTGG ACTGAGGACA TTTGGGGACT GTGTACAATG AGTTATGGAG | 2460 |
| ACTCGAGGGT TCATGCAGTC AGTGTTATAC CAAACCCAGT GTTAGGAGAA AGGACACAGC | 2520 |
| GTAATGGAGA AAGGGAAGTA GTAGAATTCA GAAACAAAAA TGCGCATCTC TTTCTTTGTT | 2580 |
| TGTCAAATGA AAATTTTAAC TGGAATTGTC TGATATTTAA GAGAAACATT CAGGACCTCA | 2640 |
| TCATTATGTG GGGGCTTTGT TCTCCACAGG GTCAGGTAAG AGATGGCCTT CTTGGCTGCC | 2700 |
| ACAATCAGAA ATCACGCAGG CATTTTGGGT AGGCGGCCTC CAGTTTTCCT TTGAGTCGCG | 2760 |
| AACGCTGTGC GTTTGTCAGA ATGAAGTATA CAAGTCAATG TTTTTCCCCC TTTTTATATA | 2820 |
| ATAATTATAT AACTTATGCA TTTATACACT ACGAGTTGAT CTCGGCCAGC CAAAGACACA | 2880 |
| CGACAAAAGA GACAATCGAT ATAATGTGGC CTTGAATTTT AACTCTGTAT GCTTAATGTT | 2940 |
| TACAATATGA AGTTATTAGT TCTTAGAATG GAGAATGTAT GTAATAAAAT AAGCTTGGCC | 3000 |
| TAGCATGGCA AATCAGATTT ATACAGGAGT CTGCATTTGC ACTTTTTTTA GTGACTAAAG | 3060 |
| TTGCTTAATG AAAACATGTG CTGAATGTTG TGGATTTTGT GTTATAATTT ACTTTGTCCA | 3120 |
| GGAACTTGTG CAAGGGAGAG CCAAGGAAAT AGGATGTTTG GCACCC | |

AAD5 DNA sequence
Gene name: activin A receptor type II-like 1 (ALK-1)
Unigene number: Hs.8881 / Hs.172670
Prabeset Accession #: T57112
Nucleic Acid Accession #: NM_000020
Coding sequence: 283-1794 (predicted start/stop codons underlined)

| | |
|---|---|
| AGGAAACGGT TTATTAGGAG GGAGTGGTGG AGCTGGGCCA GGCAGGAAGA CGCTGGAATA | 60 |
| AGAAACATTT TTGCTCCAGC CCCCATCCCA GTCCCGGGAG GCTGCCGCGC CAGCTGCGCC | 120 |
| GAGCGAGCCC CTCCCCGGCT CCAGCCCGGT CCGGGGCCGC GCCGGACCCC AGCCCGCCGT | 180 |
| CCAGCGCTGG CGGTGCAACT GCGGCCGCGC GGTGGAGGGG AGGTGGCCCC GGTCCGCCGA | 240 |
| AGGCTAGCGC CCCGCCACCC GCAGAGCGGG CCCAGAGGGA CCATGACCTT GGGCTCCCCC | 300 |
| AGGAAAGGCC TTCTGATGCT GCTGATGGCC TTGGTGACCC AGGGAGACCC TGTGAAGCCG | 360 |
| TCTCGGGGCC CGCTGGTGAC CTGCACGTGT GAGAGCCCAC ATTGCAAGGG GCCTACCTGC | 420 |
| CGGGGGGCCT GGTGCACAGT AGTGCTGGTG CGGGAGGAGG GGAGGCACCC CCAGGAACAT | 480 |
| CGGGGCTGCG GGAACTTGCA CAGGGAGCTC TGCAGGGGGC GCCCCACCGA GTTCGTCAAC | 540 |
| CACTACTGCT GCGACAGCCA CCTCTGCAAC CACAACGTGT CCCTGGTGCT GGAGGCCACC | 600 |
| CAACCTCCTT CGGAGCAGCC GGGAACAGAT GGCCAGCTGG CCCTGATCCT GGGCCCCGTG | 660 |
| CTGGCCTTGC TGGCCCTGGT GGCCCTGGGT GTCCTGGGCC TGTGGCATGT CCGACGGAGG | 720 |
| CAGGAGAAGC AGCGTGGCCT GCACAGCGAG CTGGGAGAGT CCAGTCTCAT CCTGAAAGCA | 780 |
| TCTGAGCAGG GCGACACGAT GTTGGGGGAC CTCCTGGACA GTGACTGCAC CACAGGGAGT | 840 |
| GGCTCAGGGC TCCCCTTCCT GGTGCAGAGG ACAGTGGCAC GGCAGGTTGC CTTGGTGGAG | 900 |
| TGTGTGGGAA AAGGCCGCTA TGGCGAAGTG TGGCGGGGCT TGTGGCACGG TGAGAGTGTG | 960 |
| GCCGTCAAGA TCTTCTCCTC GAGGGATGAA CAGTCCTGGT TCCGGGAGAC TGAGATCTAT | 1020 |
| AACACAGTAT TGCTCAGACA CGACAACATC CTAGGCTTCA TCGCCTCAGA CATGACCTCC | 1080 |
| CGCAACTCGA GCACGCAGCT GTGGCTCATC ACGCACTACC ACGAGCACGG CTCCCTCTAC | 1140 |
| GACTTTCTGC AGAGACAGAC GCTGGAGCCC CATCTGGCTC TGAGGCTAGC TGTGTCCGCG | 1200 |
| GCATGCGGCC TGGCGCACCT GCACGTGGAG ATCTTCGGTA CACAGGGCAA ACCAGCCATT | 1260 |
| GCCCACCGCG ACTTCAAGAG CCGCAATGTG CTGGTCAAGA GCAACCTGCA GTGTTGCATC | 1320 |
| GCCGACCTGG GCCTGGCTGT GATGCACTCA CAGGGCAGCG ATTACCTGGA CATCGGCAAC | 1380 |
| AACCCGAGAG TGGGCACCAA GCGGTACATG GCACCCGAGG TGCTGGACGA GCAGATCCGC | 1440 |
| ACGGACTGCT TTGAGTCCTA CAAGTGGACT GACATCTGGG CCTTTGGCCT GGTGCTGTGG | 1500 |
| GAGATTGCCC GCCGGACCAT CGTGAATGGC ATCGTGGAGG ACTATAGACC ACCCTTCTAT | 1560 |
| GATGTGGTGC CCAATGACCC CAGCTTTGAG GACATGAAGA AGGTGGTGTG TGTGGATCAG | 1620 |
| CAGACCCCCA CCATCCCTAA CCGGCTGGCT GCAGACCCGG TCCTCTCAGG CCTAGCTCAG | 1680 |
| ATGATGCGGG AGTGCTGGTA CCCAAACCCC TCTGCCCGAC TCACCGCGCT GCGGATCAAG | 1740 |
| AAGACACTAC AAAAAATTAG CAACAGTCCA GAGAAGCCTA AAGTGATTCA ATAGCCCAGG | 1800 |
| AGCACCTGAT TCCTTTCTGC CTGCAGGGGG CTGGGGGGGT GGGGGGCAGT GGATGGTGCC | 1860 |
| CTATCTGGGT AGAGGTAGTG TGAGTGTGGT GTGTGCTGGG GATGGGCAGC TGCGCCTGCC | 1920 |
| TGCTCGGCCC CCAGCCCACC CAGCCAAAAA TACAGCTGGG CTGAAACCTG ATCCCCTGCT | 1980 |
| GTCTGGCCTG CTCAAAGCGG CAGGCTCCCT GACGCCTGGC TCTCTCCCCA CCCCTATGGC | 2040 |
| CAGCATGGTG CACCCCCTAC CACTCCCGGG ACAGGATGCA AAAGAGGCTC CAGAGTCAGA | 2100 |
| GTGCCAAGCC AGGGAATCCC AGTCCCAGAC TCAGAGCCCG GGCCTGCACT TTGCCCCCTG | 2160 |
| CCCTTGATCA ACCCCACTGC CCCACCAGAG CTGCCAGGGT GGCACAGGGC CCTGTCCAGC | 2220 |
| CCCTGGCACA CACTTCCCTG CCAGGCCTCA GCCTCTAGCA TAAGCTCCAG AGAGCCAGGG | 2280 |
| CCCATCAGTT TCTCTCTGTG GATTTGTATC TCAGCTCCAT GATGCCTTGG GCTTTCTGTC | 2340 |
| TCCTCAACAA GAGTGCAGCT TGCTGAATGT CAGCTGCCTG AGAGAGCTGG GGCCTGACTT | 2400 |
| ACTAGGGCAT TAAATCCTAA GAGGTCCTAC TGAGGTGTGG CAGGATCACA GGCCAGTGGA | 2460 |
| AAAAGGGCAG GTCAGATGGG CAAGGCCCAG GACTTTCAGA TTAACTGAGA GGATATCGAG | 2520 |
| GCCAAGCATG GCAGGGGGAA GGTCAGTGGG TGTCAAGAGA CCCAGGTCTG ACCCCGGATG | 2580 |
| TTTGCTCCAT GTGACAAAAG CAGGCCTGTC TCAGGACCTT TTCTTTTCTT TTTTCCTTCT | 2640 |
| TTTTTTTTTT GACACGGAGT TTCGCTCTTG TTGTCCAGGC TAGAGTGCAA TGGCATGATC | 2700 |
| CCAGCTCACC GCAACGTCTA CCTCCCAGGT TCAAATCATT CTCTTGCCTC AGACTCCCGA | 2760 |
| GTAGCTGGGA TTACAGGCAC ATGCCACCAT GCCTGGCTAA TTTTGTATAT TTAGTAGAAA | 2820 |
| CAGGGTTTCA CCATGCTGGC CATGCTGGTT CTCGAACTCC TGACCTCAGG TGTTCCACCT | 2880 |
| ACCTCAGCCT CCCAAAGTGC TGGGGTTACA GGTGTGAGCC ATCGCGCCTG GCCAGGACCT | 2940 |
| TTGTTTCTTA TCTACATATT GGAAGATTTG GTCCTGATGT CCTTTGAGGC TTCTTTAGCT | 3000 |
| CTAGTTCTCT GACACTTCAG CCTATATCAC AGCTAACTTC YTCAGTCTCA TCTATTCCTT | 3060 |
| ATGCTCCAGC CCCTGGCAAT TTGCCTCAAG ATGGGGGTTT GAAAATAACT TTACCTGACT | 3120 |
| CAAGGAGTGT CTGGAGCACC TCCTAGTCTA AGTCTGCAAG CTCCAGTTCT TGCCTAAAAC | 3180 |
| CATGCCAGTG GCCACCCTTG GGCTCAGACA GCTCTGGGCC TTTTGACCAC AAGCCAGCCC | 3240 |
| CTCGCCCTCT CTGTGGCATA GTCTTCTCTG CCCCAGGACT GCAGGGCGGC TTCCTCCAAG | 3300 |
| GCTTCCAAGG CTCAAAAGAA ATTTGGCTCC ATCCAAGAAG GCTCCAGCTC CCCTACTGGC | 3360 |
| CCCTGGCTTC AGGCCCACAC CCCTGGGCCA GGSCCAGAGA GTGTGTCTCA GGAGAATTCA | 3420 |
| ATGGGCTCTA GAGAGACACA CAGAAAGTTT GGGCATTTGG GAAATTTTCA AGGRTGTATG | 3480 |
| TATGGYTCAC GTATGGWGCA GGTTGTCCTG GTCCYKGGGT GCAGGGAAGT GGGCTGCAGG | 3540 |
| GAAGTGGATT GGAGGGGAGC TTGAGGAATA TAAGGAGCGG GGGTGGAGAC TCAGGCTATG | 3600 |
| GACAAGGACA GCCCCAAGGT TGGGAAGACC TGGCCTTAGT CGTCCTCAGC CTAGGGCAGG | 3660 |
| GCAGTGAAGA AAGCTCTCCC CGCTCCTGCT GTAATGACCC AGAGTAGCCT CCCCAGGCCG | 3720 |
| GCATCTTATG TGTGTCTTCC ACCATCCTCA TGGTGGCACT TTTCTAGGCC TGTCTCCCAG | 3780 |
| CATTGTGCAA GGCTCGGAAG AGAACCACCA AGTGAAACTG GGTGAAAACA GAAAGCTCAA | 3840 |
| TGGATGGGCT AGGTTCCCAG ATCATTAGGG CAGAGTTTGC ACGTCCTCTG GTTCACTGGG | 3900 |
| AATCCACCCA GCCCACGAAT CATCTCCCTC TTTGAAGGAT TTTWATTTCT ACTGGGTTTT | 3960 |
| GGAACAAACT CCTGCTGAGA CCCCACAGCC AGAAACTGAA AGCAGCAGCT CCCCAAAGCC | 4020 |
| TGGAAAATCC CTAAGAGAAG GCCTGGGGGA MAGGAAKTGG AGTGACAGGG GACAGGTAGA | 4080 |
| GAGAAGGGGG CCCAATGGCC AGGGAGTGAA GGAGGTGGCG TTGCTGAGAG CAGTCTGCAC | 4140 |
| ATGCTTCTGT CTGAGTGCAG GAAGGTGTTC CAGGGTCGAA ATTACACTTC TCGTACCTGG | 4200 |
| AGACGCTGTT TGTGGGAGCA CTGGGCTCAT GCCTGGCACA CAATAGGTCT GCAATAAACC | 4260 |
| ATGGTTAAAT CCTGAAAAAA AAAAAAAAA | |

AAD8 DNA sequence
Gene name: ESTs
Unigene number: Hs.144953
Probeset Accession #: AA404418
Nucleic Acid Accession 4: n/a
Coding sequence: no ORF identified; possible frameshifts

| | |
|---|---|
| TATGTCCACC AAAGACACCT CGTTGGTCAT GTTCTATCAC CTCTTCGTCA AATTGACATC | 60 |
| AGGTCCTAAC AGGTCACTTT CAAGATACAG AAGAGGCAAA TTTTGTTTTG AGACTTGGCC | 120 |
| ATTCCTAGGG TCAGCAAAGT GTATTCCTGG CAGCCAGACC TTCAGTCACT TATCAGGAAA | 180 |
| TGCTTGACCT AAAGACAGAC AATTCTTTCC CCAAACTTTG CTGTTTCTTT TTTGAGTCTT | 240 |
| TGTTGAAAGA TTTCTTTTAA AAGGCGTTCG TGTGAGAAGA TCACAGCAAC AAATCTGGCT | 300 |
| TGTTCTGTTT TAGACTTACT TTCTTAACTC TTGGGCAGAA GAAAATGAAT GAGATTTGAA | 360 |
| GACCTTTGAT ACCTTGGGTA GACAAAGCTT GCCTTGAAAC TAGAAATAAG ACGAAACTAG | 420 |
| ATTTTAAGGG GAAAAAATTT GCTAGTGGTA ATATAATTGG TTTTGTTTCA TTTTTTTATG | 480 |
| AGTCTGAGGA GTTGACATTA AACGTTGGGA TGTTGCTTTG TTAATGAAGT CATTTCAATT | 540 |
| TTTGCAACTC TTAACATCTG CATGCTTCCA TAAACAGTGG GTTGGAACAA AAGAAAATGT | 600 |
| GACTAAGGGA TATTCCTTAA ATTCTTTTTT ATGTTATGAG AGAGAATATT GGAATATAAA | 660 |
| GAATGTTACT TTATCTGGTA AACCATCTCA TAGGCCAGAA GCACTAACAG TTTGAATGGT | 720 |
| TGGCTTAAAA AAAAACGGGA GTCTTTGAAT TTAAGCTTAT GTAAAATTAC TATGCAAATA | 780 |
| TAGGTTATTA TTTATTTTTA CAGTGAAAAT AAAACACTAT TGAAGTATAA ATGGAAAGAA | 840 |
| AATAAAAGCA AAGCCTGTTT AATATAGAGA CATTAATGTT GATATCACTG TACGAACAGT | 900 |
| CATAGCTTGC TGCTCACTGC CGTTAAAGGG TTGACATACA AACATTGTGG AAGAGATTTC | 960 |
| AGTTTGAGGG CTAGTGTCTG AATTATGGAC TCCTTACCCT ACTCCACCAC TTAAAACATT | 1020 |
| TTAGAGACTT TTGTGAAATT AACAGGTCAT ATAATTAATA ATTGTTGTTT TATGTACATT | 1080 |
| TATTGAAAGG CCATATTGAG GCTCCATTGA TTTTTTTTCC TGCATATTTA TCAGTATCGA | 1140 |
| ATTAGAAAAT TGAACCTTCA GTGTTACTAG ATGGAAATCT ACCAAAAAGT AGCAAGGTTT | 1200 |
| ACGAATGGTG GGATTTATTG GTGATTAAAC ATTTTTTTCC TGTATTTTAT AAGTTTCACA | 1260 |
| TTACATTTAC AATGAGAAAA AAATGTAAAT GTAGAATTAA AGTCTTGTTA ATATCGTAAT | 1320 |
| TTGCCTATTG CTGTACTAAA AGAAGCTTCT ATAAAATGTA TCATTCTCAT CCTTAGATTC | 1380 |
| AGGCCAGAAA GTAACTTTCA GTGTTAGGTA TTTGAAATAA TGCAGCCTGT CATATGTACT | 1440 |
| CTGGTTACCA GAATGAAAAA ACAAAAAGAG ATACATACAT AGTAAGGAAA CATGAAATTG | 1500 |
| GAGGAATTGA TCCCCATGTG TATTGCAGCT TCATATACCA GTAGTCTCTA ATAAGTCATT | 1560 |
| GCTTTAATAA AAAAAAAAAT AGAAAATTTA AA | |

ACA2 DNA sequence
Gene name: EST
Unigene number: Hs.16450
Probeset Accession #: AA478778
Nucleic Acid Accession #: AA478778
Coding sequence: no ORF identified; possible frameshifts

| | |
|---|---|
| TATTTTTGTA CGTAAAATGA TTCTATTATG ACTGCCTTTG CATGTAGTAA TATGACAAAG | 60 |
| TGATCCTTCA TTATCACGGT ACACTATTGT TTACTTTTCA TCTGTAAATG TTTTATTGTT | 120 |
| ACTTTTTTAA AATGAATTTT TTTAAAACAA TCTAGCCATC ATCAAGGTGC TATAAGAGTT | 180 |
| GTATAAAAGA TATTTTTGGC ATTTCTAGGC AAGTATCAGC CAATAAGTAT GTTAGTGATA | 240 |
| TCACAGATTG TACCAACTAT TAACTATGTT AAATAAGTAT TCAGTTTCAT GTGATCTCTG | 300 |
| GGAAAAAAAT ATGCTGCCTT GGTGCTAATA TTGTATGTAT TTAAATGATC ATCTGACTCA | 360 |
| GAAATATAAA CACTTTTAAT GAAAGGGAGG AACGGAAGGA CAATTTCCAG TGCACAGAAT | 420 |
| CACTTGGATG AAATAAGACC AGCTCTTTAC CCTTATTTTT GGATATGCCT TTTTTGGAAG | 480 |
| AGACTTAGAC TTTATCCTTA TTGTTGTTAG TGTTGTTAAT ATTCGTTGCT TCAGCCCACG | 540 |
| GTGCCTTGGT CTCTCCACAA TCAAATGGAG GATCCCCCAA GCAGCTTCAT TACAGAGTGA | 600 |
| TATTGGGAAA GTGAGATCCT CTCACCATTT TGCCAAGATA CTCTAAAATG ACATCCAAGT | 660 |
| TTACCAGTAG AAAGACACAG GATGCACAGA ATGGGCATGA CCTTCAGCTC ACGAGCACAC | 720 |
| CTGGAGAAAT TCAGAACCAG GTTCTGAATC ATCACGATTG CCTTTTGCAT GAAAACATCG | 780 |
| GCTGGTGATG TGACTTCTCT TCAGGCCATG AGCCTAACAY CCTGCCGGTT TTCATGCCCG | 840 |
| CTGCAGTAAT GGACGTTTGT GTGAAGAAAT GAACTGTGGA GTACAAAA CTTTGAGTCT | 900 |
| TTCCGATTGC TCATTAATTC ACTTTTTTGT TACTTCTTTC CAAAATGGAA GTGCTGAAGC | 960 |
| CATGGTCTTT CTGCCCCTCC AAGCTGATGA AGGGAAGCCT TTGCCAATGG CCCATGGAAG | 1020 |
| ACACTTGGTT TGAGAAACCC TGCCCACTTC CAAAGACCAA AGAGATTAGG AAAAGCCTGG | 1080 |
| CAGTATTCTC CAACTCCAAA CAAGCTCTAG AGTGCTCCAG GAAAAGTTAT ATTCAGTATA | 1140 |
| TGAATAAGTG TTATTCTCCA TTATTAATGT GTTCTGAAAA TATATTATGA ATAAATACAT | 1200 |
| CACCACACCC AAAAAAAAAA AAAAAAAAAA AAAA | |

ACA4 DNA sequence
Gene name: alpha satellite junction DNA sequence
Unigene number: Hs.247946
Probeset Accession #: M21305
Nucleic Acid Accession #: M21305
Coding sequence: 1-165 (predicted start/stop codons underlined)

| | |
|---|---|
| ATGGAATGGA ATGGAATGGC ATGGAATCGT ATAAAGTGGA ATGGAATCAA CTCGAGTGGA | 60 |
| ATGGAATGGA ATGGAATGGA ATGGAATGCA GTACAATGCA ATAGAATGGA ATGGAATGAA | 120 |
| CTCGAGTTGA CTGGAATGGA ATGGAATGGA ATGCATTTGA ATTGA | |

ACG6 DNA sequence
Gene name: intercellular adhesion molecule 2 (ICAM2)
Unigene number: Hs.83733
Probeset Accession #: M32334
Nucleic Acid Accession #: NM_000873
Coding sequence: 63-890 (predicted start/stop codons underlined)

| | |
|---|---|
| CTAAAGATCT CCCTCCAGGC AGCCCTTGGC TGGTCCCTGC GAGCCCGTGG AGACTGCCAG | 60 |
| AGATGTCCTC TTTCGGTTAC AGGACCCTGA CTGTGGCCCT CTTCACCCTG ATCTGCTGTC | 120 |
| CAGGATCGGA TGAGAAGGTA TTCGAGGTAC ACGTGAGGCC AAAGAAGCTG GCGGTTGAGC | 180 |
| CCAAAGGGTC CCTCGAGGTC AACTGCAGCA CCACCTGTAA CCAGCCTGAA GTGGGTGGTC | 240 |
| TGGAGACCTC TCTAAATAAG ATTCTGCTGG ACGAACAGGC TCAGTGGAAA CATTACTTGG | 300 |
| TCTCAAACAT CTCCCATGAC ACGCTCCTCC AATGCCACTT CACCTGCTCC GGGAAGCAGG | 360 |
| AGTCAATGAA TTCCAACGTC AGCGTGTACC AGCCTCCAAG GCAGGTCATC CTGACACTGC | 420 |
| AACCCACTTT GGTGGCTGTG GGCAAGTCCT TCACCATTGA GTGCAGGGTG CCCACCGTGG | 480 |
| AGCCCCTGGA CAGCCTCACC CTCTTCCTGT TCCGTGGCAA TGAGACTCTG CACTATGAGA | 540 |
| CCTTCGGGAA GGCAGCCCCT GCTCCGCAGG AGGCCACAGC CACATTCAAC AGCACGGCTG | 600 |
| ACAGAGAGGA TGGCCACCGC AACTTCTCCT GCCTGGCTGT GCTGGACTTG ATGTCTCGCG | 660 |
| GTGGCAACAT CTTTCACAAA CACTCAGCCC CGAAGATGTT GGAGATCTAT GAGCCTGTGT | 720 |
| CGGACAGCCA GATGGTCATC ATAGTCACGG TGGTGTCGGT GTTGCTGTCC CTGTTCGTGA | 780 |
| CATCTGTCCT GCTCTGCTTC ATCTTCGGCC AGCACTTGCG CCAGCAGCGG ATGGGCACCT | 840 |
| ACGGGGTGCG AGCGGCTTGG AGGAGGCTGC CCCAGGCCTT CCGGCCATAG CAACCATGAG | 900 |
| TGGCATGGCC ACCACCACGG TGGTCACTGG AACTCAGTGT GACTCCTCAG GGTTGAGGTC | 960 |
| CAGCCCTGGC TGAAGGACTG TGACAGGCAG CAGAGACTTG GGACATTGCC TTTTCTAGCC | 1020 |
| CGAATACAAA CACCTGGACT T | |

ACG7 DNA sequence
Gene name: Cadherin 5, VE-cadherin (CDH5)
Unigene number: Hs.76206
Probeset Accession #: X79981
Nucleic Acid Accession #: NM_001795
Coding sequence: 25-2379 (predicted start/stop codons underlined)

| | |
|---|---|
| GCACGATCTG TTCCTCCTGG GAAGATGCAG AGGCTCATGA TGCTCCTCGC CACATCGGGC | 60 |
| GCCTGCCTGG GCCTGCTGGC AGXGGCAGCA GTGGCAGCAG CAGGTGCTAA CCCTGCCCAA | 120 |
| CGGGACACCC ACAGCCTGCT GCCCACCCAC CGGCGCCAAA AGAGAGATTG GATTTGGAAC | 180 |
| CAGATGCACA TTGATGAAGA GAAAAACACC TCACTTCCCC ATCATGTAGG CAAGATCAAG | 240 |
| TCAAGCGTGA GTCGCAAGAA TGCCAAGTAC CTGCTCAAAG GAGAATATGT GGGCAAGGTC | 300 |
| TTCCGGGTCG ATGCAGAGAC AGGAGACGTG TTCGCCATTG AGAGGCTGGA CCGGGAGAAT | 360 |
| ATCTCAGAGT ACCACCTCAC TGCTGTCATT GTGGACAAGG ACACTGGTGA AAACCTGGAG | 420 |
| ACTCCTTCCA GCTTCACCAT CAAAGTTCAT GACGTGAACG ACAACTGGCC TGTGTTCACG | 480 |
| CATCGGTTGT TCAATGCGTC CGTGCCTGAG TCGTCGGCTG TGGGGACCTC AGTCATCTCT | 540 |
| GTGACAGCAG TGGATGCAGA CGACCCCACT GTGGGAGACC ACGCCTCTGT CATGTACCAA | 600 |
| ATCCTGAAGG GGAAAGAGTA TTTTGCCATC GATAATTCTG GACGTATTAT CACAATAACG | 660 |
| AAAAGCTTGG ACCGAGAGAA GCAGGCCAGG TATGAGATCG TGGTGGAAGC GCGAGATGCC | 720 |
| CAGGGCCTCC GGGGGGACTC GGGCACGGCC ACCGTGCTGG TCACTCTGCA AGACATCAAT | 780 |
| GACAACTTCC CCTTCTTCAC CCAGACCAAG TACACATTTG TCGTGCCTGA AGACACCCGT | 840 |
| GTGGGCACCT CTGTGGGCTC TCTGTTTGTT GAGGACCCAG ATGAGCCCCA GAACCGGATG | 900 |
| ACCAAGTACA GCATCTTGCG GGGCGACTAC CAGGACGCTT TCACCATTGA GACAAACCCC | 960 |
| GCCCACAACG AGGGCATCAT CAAGCCCATG AAGCCTCTGG ATTATGAATA CATCCAGCAA | 1020 |
| TACAGCTTCA TCGTCGAGGC CACAGACCCC ACCATCGACC TCCGATACAT GAGCCCTCCC | 1080 |
| GCGGGAAACA GAGCCCAGGT CATTATCAAC ATCACAGATG TGGACGAGCC CCCCATTTTC | 1140 |
| CAGCAGCCTT TCTACCACTT CCAGCTGAAG GAAAACCAGA AGAAGCCTCT GATTGGCACA | 1200 |
| GTGCTGGCCA TGGACCCTGA TGCGGCTAGG CATAGCATTG GATACTCCAT CCGCAGGACC | 1260 |
| AGTGACAAGG GCCAGTTCTT CCGAGTCACA AAAAAGGGGG ACATTTACAA TGAGAAAGAA | 1320 |
| CTGGACAGAG AAGTCTACCC CTGGTATAAC CTGACTGTGG AGGCCAAAGA ACTGGATTCC | 1380 |
| ACTGGAACCC CCACAGGAAA AGAATCCATT GTGCAAGTCC ACATTGAAGT TTTGGATGAG | 1440 |
| AATGACAATG CCCCGGAGTT TGCCAAGCCC TACCAGCCCA AAGTGTGTGA GAACGCTGTC | 1500 |
| CATGGCCAGC TGGTCCTGCA GATCTCCGCA ATAGACAAGG ACATAACACC ACGAAACGTG | 1560 |
| AAGTTCAAAT TCACCTTGAA TACTGAGAAC AACTTTACCC TCACGGATAA TCACGATAAC | 1620 |
| ACGGCCAACA TCACAGTCAA GTATGGGCAG TTTGACCGGG AGCATACCAA GGTCCACTTC | 1680 |
| CTACCCGTGG TCATCTCAGA CAATGGGATG CCAAGTCGCA CGGGCACCAG CACGCTGACC | 1740 |
| GTGGCCGTGT GCAAGTGCAA CGAGCAGGGC GAGTTCACCT TCTGCGAGGA TATGGCCGCC | 1800 |
| CAGGTGGGCG TGAGCATCCA GGCAGTGGTA GCCATCTTAC TCTGCATCCT CACCATCACA | 1860 |
| GTGATCACCC TGCTCATCTT CCTGCGGCGG CGGCTCCGGA AGCAGGCCCG CGCGCACGGC | 1920 |
| AAGAGCGTGC CGGAGATCCA CGAGCAGCTG GTCACCTACG ACGAGGAGGG CGGCGGCGAG | 1980 |
| ATGGACACCA CCAGCTACGA TGTGTCGGTG CTCAACTCGG TGCGCCGCGG CGGGGCCAAG | 2040 |
| CCCCCGCGGC CCGCGCTGGA CGCCCGGCCT TCCCTCTATG CGCAGGTGCA GAAGCCACCG | 2100 |
| AGGCACGCGC CTGGGGCACA CGGAGGGCCC GGGGAGATGG CAGCCATGAT CGAGGTGAAG | 2160 |
| AAGGACGAGG CGGACCACGA CGGCGACGGC CCCCCCTACG ACACGCTGCA CATCTACGGC | 2220 |
| TACGAGGGCT CCGAGTCCAT AGCCGAGTCC CTCAGCTCCC TGGGCACCGA CTCATCCGAC | 2280 |
| TCTGACGTGG ATTACGACTT CCTTAACGAC TGGGGACCCA GGTTTAAGAT GCTGGCTGAG | 2340 |
| CTGTACGGCT CGGACCCCCG GGAGGAGCTG CTGTATTAGG CGGCCGAGGT CACTCTGGGC | 2400 |
| CTGGGGACCC AAACCCCCTG CAGCCCAGGC CAGTCAGACT CCAGGCACCA CAGCCTCCAA | 2460 |
| AAATGGCAGT GACTCCCCAG CCCAGCACCC CTTCCTCGTG GGTCCCAGAG ACCTCATCAG | 2520 |
| CCTTGGGATA GCAAACTCCA GGTTCCTGAA ATATCCAGGA ATATATGTCA GTGATGACTA | 2580 |
| TTCTCAAATG CTGGCAAATC CAGGCTGGTG TTCTGTCTGG GCTCAGACAT CCACATAACC | 2640 |
| CTGTCACCCA CAGACCGCCG TCTAACTCAA AGACTTCCTC TGGCTCCCCA AGGCTGCAAA | 2700 |
| GCAAAACAGA CTGTGTTTAA CTGCTGCAGG GTCTTTTTCT AGGGTCCCTG AACGCCCTGG | 2760 |
| TAAGGCTGGT GAGGTCCTGG TGCCTATCTG CCTGGAGGCA AAGGCCTGGA CAGCTTGACT | 2820 |
| TGTGGGGCAG GATTCTCTGC AGCCCATTCC CAAGGGAGAC TGACCATCAT GCCCTCTCTC | 2880 |
| GGGAGCCCTA GCCCTGCTCC AACTCCATAC TCCACTCCAA GTGCCCCACC ACTCCCCAAC | 2940 |
| CCCTCTCCAG GCCTGTCAAG AGGGAGGAAG GGGCCCCATG GCAGCTCCTG ACCTTGGGTC | 3000 |
| CTGAAGTGAC CTCACTGGCC TGCCATGCCA GTAACTGTGC TGTACTGAGC ACTGAACCAC | 3060 |
| ATTCAGGGAA ATGCTTATTA AACCTTGAAG CAACTGTGAA TTCATTCTGG AGGGGCAGTG | 3120 |
| GAGATCAGGA GTGACAGATC ACAGGGTGAG GGCCACCTCC ACACCCACCC CCTCTGGAGA | 3180 |
| AGGCCTGGAA GAGCTGAGAC CTTGCTTTGA GACTCCTCAG CACCCCTCCA GTTTTGCCTG | 3240 |
| AGAAGGGGCA GATGTTCCCG GAGATCAGAA GACGTCTCCC CTTCTCTGCC TCACCTGGTC | 3300 |
| GCCAATCCAT GCTCTCTTTC TTTTCTCTGT CTACTCCTTA TCCCTTGGTT TAGAGGAACC | 3360 |
| CAAGATGTGG CCTTTAGCAA AACTGACAAT GTCCAAACCC ACTCATGACT GCATGACGGA | 3420 |
| GCCGAGCATG TGTCTTTACA CCTCGCTGTT GTCACATCTC AGGGAACTGA CCCTCAGGCA | 3480 |
| CACCTTGCAG AAGGAAGGCC CTGCCCTGCC CAACCTCTGT GGTCACCCAT GCATCATTCC | 3540 |
| ACTGGAACGT TTCACTGCAA ACACACCTTG GAGAAGTGGC ATCAGTCAAC AGAGAGGGGC | 3600 |
| AGGGAAGGAG ACACCAAGCT CACCCTTCGT CATGGACCGA GGTTCCCACT CTGGCAAAGC | 3660 |
| CCCTCACACT GCAAGGGATT GTAGATAACA CTGACTTGTT TGTTTTAACC AATAACTAGC | 3720 |
| TTCTTATAAT GATTTTTTTA CTAATGATAC TTACAAGTTT CTAGCTCTCA CAGACATATA | 3780 |
| GAATAAGGGT TTTTGCATAA TAAGCAGGTT GTTATTTAGG TTAACAATAT TAATTCAGGT | 3840 |
| TTTTTAGTTG GAAAAACAAT TCCTGTAACC TTCTATTTTC TATAATTGTA GTAATTGCTC | 3900 |
| TACAGATAAT GTCTATATAT TGGCCAAACT GGTGCATGAC AAGTACTGTA TTTTTTTATA | 3960 |
| CCTAAATAAA GAAAAATCTT TAGCCTGGGC AACAAAAAAA | |

ACG9 DNA sequence
Gene name: lysyl oxidase-like 2 (LOXL2)
Unigene number: Hs.83354
Probeset Accession #: U89942
Nucleic Acid Accession #: NM_002318 cluster
Coding sequence: 248-2572 (predicted start/stop codons underlined)

| | |
|---|---|
| ACTCCAGCGC GCGGCTACCT ACGCTTGGTG CTTGCTTTCT CCAGCCATCG GAGACCAGAG | 60 |
| CCGCCCCCTC TGCTCGAGAA AGGGGCTCAG CGGCGGCGGA AGCGGAGGGG GACCACCGTG | 120 |
| GAGAGCGCGG TCCCAGCCCG GCCACTGCGG ATCCCTGAAA CCAAAAAGCT CCTGCTGCTT | 180 |
| CTGTACCCCG CCTGTCCCTC CCAGCTGCGC AGGGCCCCTT CGTGGGATCA TCAGCCCGAA | 240 |
| GACAGGGATG GAGAGGCCTC TGTGCTCCCA CCTCTGCAGC TGCCTGGCTA TGCTGGCCCT | 300 |
| CCTGTCCCCC CTGAGGCTGG CACAGTATGA CAGCTGGCCC CATTACCCCG AGTACTTCCA | 360 |
| GCAACCGGCT CCTGAGGATC ACCAGCCCCA GGCCCCCGCC AACGTGGCCA AGATTCAGCT | 420 |
| GCGCCTGGCT GGGCAGAAGA GGAAGCACAG CGAGGGCCGG GTGGAGGTGT ACTATGATGG | 480 |
| CCAGTGGGGC ACCGTGTGCG ATGACGACTT CTCCATCCAC GCTGCCCACG TCGTCTGCCG | 540 |
| GGAGCTGGGC TATGTGGAGG CCAAGTCCTG GACTGCCAGC TCCTCCTACG GCAAGGGAGA | 600 |
| AGGGCCCATC TGGTTAGACA ATCTCCACTG TACTGGCAAC GAGGCGACCC TTGCAGCATG | 660 |
| CACCTCCAAT GGCTGGGGCG TCACTGACTG CAAGCACACG GAGGATGTCG GTGTGGTGTG | 720 |
| CAGCGACAAA AGGATTCCTG GGTTCAAATT TGACAATTCG TTGATCAACC AGATAGAGAA | 780 |
| CCTGAATATC CAGGTGGAGG ACATTCGGAT TCGAGCCATC CTCTCAACCT ACCGCAAGCG | 840 |
| CACCCCAGTG ATGGAGGGCT ACGTGGAGGT GAAGGAGGGC AAGACCTGGA AGCAGATCTG | 900 |
| TGACAAGCAC TGGACGGCCA AGAATTCCCG CGTGGTCTGC GGCATGTTTG GCTTCCCTGG | 960 |
| GGAGAGGACA TACAATACCA AAGTGTACAA AATGTTTGCC TCACGGAGGA AGCAGCGCTA | 1020 |
| CTGGCCATTC TCCATGGACT GCACCGGCAC AGAGGCCCAC ATCTCCAGCT GCAAGCTGGG | 1080 |
| CCCCCAGGTG TCACTGGACC CCATGAAGAA TGTCACCTGC GAGAATGGGC TGCCGGCCGT | 1140 |
| GGTGAGTTGT GTGCCTGGGC AGGTCTTCAG CCCTGACGGA CCCTCGAGAT TCCGGAAAGC | 1200 |
| ATACAAGCCA GAGCAACCCC TGGTGCGACT GAGAGGCGGT GCCTACATCG GGGAGGGCCG | 1260 |
| CGTGGAGGTG CTCAAAAATG GAGAATGGGG GACCGTCTGC GACGACAAGT GGGACCTGGT | 1320 |
| GTCGGCCAGT GTGGTCTGCA GAGAGCTGGG CTTTGGGAGT GCCAAAGAGG CAGTCACTGG | 1380 |
| CTCCCGACTG GGGCAAGGGA TCGGACCCAT CCACCTCAAC GAGATCCAGT GCACAGGCAA | 1440 |
| TGAGAAGTCC ATTATAGACT GCAAGTTCAA TGCCGAGTCT CAGGGCTGCA ACCACGAGGA | 1500 |
| GGATGCTGGT GTGAGATGCA ACACCCCTGC CATGGGCTTG CAGAAGAAGC TGCGCCTGAA | 1560 |
| CGGCGGCCGC AATCCCTACG AGGGCCGAGT GGAGGTGCTG GTGGAGAGAA ACGGGTCCCT | 1620 |
| TGTGTGGGGG ATGGTGTGTG GCCAAAACTG GGGCATCGTG GAGGCCATGG TGGTCTGCCG | 1680 |
| CCAGCTGGGC CTGGGATTCG CCAGCAACGC CTTCCAGGAG ACCTGGTATT GGCACGGAGA | 1740 |
| TGTCAACAGC AACAAAGTGG TCATGAGTGG AGTGAAGTGC TCGGGAACGG AGCTGTCCCT | 1800 |
| GGCGCACTGC CGCCACGACG GGGAGGACGT GGCCTGCCCC CAGGGCGGAG TGCAGTACGG | 1860 |
| GGCCGGAGTT GCCTGCTCAG AAACCGCCCC TGACCTGGTC CTCAATGCGG AGATGGTGCA | 1920 |
| GCAGACCACC TACCTGGAGG ACCGGCCCAT GTTCATGCTG CAGTGTGCCA TGGAGGAGAA | 1980 |
| CTGCCTCTCG GCCTCAGCCG CGCAGACCGA CCCCACCACG GGCTACCGCC GGCTCCTGCG | 2040 |
| CTTCTCCTCC CAGATCCAGA ACAATGGCCA GTCCGACTTC CGGCCCAAGA AGGGCGGCCA | 2100 |
| CGCGTGGATC TGGCACGACT GTCACAGGCA CTACCACAGC ATGGAGGTGT TCACCCACTA | 2160 |
| TGACCTGCTG AACCTCAATG GCACCAAGGT GGCAGAGGGC CACAAGGCCA GCTTCTGCTT | 2220 |
| GGAGGACACA GAATGTGAAG GAGACATCCA GAAGAATTAC GAGTGTGCCA ACTTCGGCGA | 2280 |
| TCAGGGCATC ACCATGGGCT GCTGGGACAT GTACCGCCAT GACATCGACT GCCAGTGGGT | 2340 |
| TGACATCACT GACGTGCCCC CTGGAGACTA CCTGTTCCAG GTTGTTATTA ACCCCAACTT | 2400 |
| CGAGGTTGCA GAATCCGATT ACTCCAACAA CATCATGAAA TGCAGGAGCC GCTATGACGG | 2460 |
| CCACCGCATC TGGATGTACA ACTGCCACAT AGGTGGTTCC TTCAGCGAAG AGACGGAAAA | 2520 |
| AAAGTTTGAG CACTTCAGCG GGCTCTTAAA CAACCAGCTG TCCCCGCAGT AAAGAAGCCT | 2580 |
| GCGTGGTCAA CTCCTGTCTT CAGGCCACAC CACATCTTCC ATGGGACTTC CCCCCAACAA | 2640 |
| CTGAGTCTGA ACGAATGCCA CGTGCCCTCA CCCAGCCCGG CCCCCACCCT GTCCAGACCC | 2700 |
| CTACAGCTGT GTCTAAGCTC AGGAGGAAAG GGACCCTCCC ATCATTCATG GGGGGCTGCT | 2760 |
| ACCTGACCCT TGGGGCCTGA GAAGGCCTTG GGGGGGTGGG GTTTGTCCAC AGAGCTGCTG | 2820 |
| GAGCAGCACC AAGAGCCAGT CTTGACCGGG ATGAGGCCCA CAGACAGGTT GTCATCAGCT | 2880 |
| TGTCCCATTC AAGCCACCGA GCTCACCACA GACACAGTGG AGCCGCGCTC TTCTCCAGTG | 2940 |
| ACACGTGGAC AAATGCGGGC TCATCAGCCC CCCCAGAGAG GGTCAGGCCG AACCCCATTT | 3000 |
| CTCCTCCTCT TAGGTCATTT TCAGCAAACT TGAATATCTA GACCTCTCTT CCAATGAAAC | 3060 |
| CCTCCAGTCT ATTATAGTCA CATAGATAAT GGTGCCACGT GTTTTCTGAT TTGGTGAGCT | 3120 |
| CAGACTTGGT GCTTCCCTCT CCACAACCCC CACCCCTTGT TTTTCAAGAT ACTATTATTA | 3180 |
| TATTTTCACA GACTTTTGAA GCACAAATTT ATTGGCATTT AATATTGGAC ATCTGGGCCC | 3240 |
| TTGGAAGTAC AAATCTAAGG AAAAACCAAC CCACTGTGTA AGTGACTCAT CTTCCTGTTG | 3300 |
| TTCCAATTCT GTGGGTTTTT GATTCAACGG TGCTATAACC AGGGTCCTGG GTGACAGGGC | 3360 |
| GCTCACTGAG CACCATGTGT CATCACAGAC ACTTACACAT ACTTGAAACT TGGAATAAAA | 3420 |
| GAAAGATTTA TG | |

ACH2 DNA sequence
Gene name:TIE tyrosine-protein kinase
Unigene number: Hs.78824
Probeset Accession #: X60957
Nucleic Acid Accession #: NM_005424 cluster
Coding sequence: 37-3452 (predicted start/stop codons underlined)

| | |
|---|---|
| CGCTCGTCCT GGCTGGCCTG GGTCGGCCTC TGGAGTATGG TCTGGCGGGT GCCCCCTTTC | 60 |
| TTGCTCCCCA TCCTCTTCTT GGCTTCTCAT GTGGGCGCGG CGGTGGACCT GACGCTGCTG | 120 |
| GCCAACCTGC GGCTCACGGA CCCCCAGCGC TTCTTCCTGA CTTGCGTGTC TGGGGAGGCC | 180 |
| GGGGCGGGGA GGGGCTCGGA CGCCTGGGGC CCGCCCCTGC TGCTGGAGAA GGACGACCGT | 240 |
| ATCGTGCGCA CCCCGCCCGG GCCACCCCTG CGCCTGGCGC GCAACGGTTC GCACCAGGTC | 300 |
| ACGCTTCGCG GCTTCTCCAA GCCCTCGGAC CTCGTGGGCG TCTTCTCCTG CGTGGGCGGT | 360 |
| GCTGGGGCGC GGCGCACGCG CGTCATCTAC GTGCACACA GCCCTGGAGC CCACCTGCTT | 420 |
| CCAGACAAGG TCACACACAC TGTGAACAAA GGTGAGACCG CTGTACTTTC TGCACGTGTG | 480 |
| CACAAGGAGA AGCAGACAGA CGTGATCTGG AAGAGCAACG GATCCTACTT CTACACCCTG | 540 |
| GACTGGCATG AAGCCCAGGA TGGGCGGTTC CTGCTGCAGC TCCCAAATGT GCAGCCACCA | 600 |
| TCGAGCGGCA TCTACAGTGC CACTTACCTG GAAGCCAGCC CCCTGGGCAG CGCCTTCTTT | 660 |
| CGGCTCATCG TGCGGGGTTG TGGGGCTGGG CGCTGGGGGC CAGGCTGTAC CAAGGAGTGC | 720 |
| CCAGGTTGCC TACATGGAGG TGTCTGCCAC GACCATGACG GCGAATGTGT ATGCCCCCCT | 780 |
| GGCTTCACTG GCACCCGCTG TGAACAGGCC TGCAGAGAGG GCCGTTTTGG GCAGAGCTGC | 840 |
| CAGGAGCAGT GCCCAGGCAT ATCAGGCTGC CGGGGCCTCA CCTTCTGCCT CCCAGACCCC | 900 |
| TATGGCTGCT CTTGTGGATC TGGCTGGAGA GGAAGCCAGT GCCAAGAAGC TTGTGCCCCT | 960 |
| GGTCATTTTG GGGCTGATTG CCGACTCCAG TGCCAGTGTC AGAATGGTGG CACTTGTGAC | 1020 |
| CGGTTCAGTG GTTGTGTCTG CCCCTCTGGG TGGCATGGAG TGCACTGTGA GAAGTCAGAC | 1080 |
| CGGATCCCCC AGATCCTCAA CATGGCCTCA GAACTGGAGT TCAACTTAGA GACGATGCCC | 1140 |
| CGGATCAACT GTGCAGCTGC AGGGAACCCC TTCCCCGTGC GGGGCAGCAT AGAGCTACGC | 1200 |
| AAGCCAGACG GCACTGTGCT CCTGTCCACC AAGGCCATTG TGGAGCCAGA GAAGACCACA | 1260 |
| GCTGAGTTCG AGGTGCCCCG CTTGGTTCTT GCGGACAGTG GGTTCTGGGA GTGCCGTGTG | 1320 |
| TCCACATCTG GCGGCCAAGA CAGCCGGCGC TTCAAGGTCA ATGTGAAAGT GCCCCCCGTG | 1380 |
| CCCCTGGCTG CACCTCGGCT CCTGACCAAG CAGAGCCGCC AGCTTGTGGT CTCCCCGCTG | 1440 |
| GTCTCGTTCT CTGGGGATGG ACCCATCTCC ACTGTCCGCC TGCACTACCG GCCCCAGGAC | 1500 |
| AGTACCATGG ACTGGTCGAC CATTGTGGTG GACCCCAGTG AGAACGTGAC GTTAATGAAC | 1560 |
| CTGAGGCCAA AGACAGGATA CAGTGTTCGT GTGCAGCTGA GCCGGCCAGG GGAAGGAGGA | 1620 |
| GAGGGGGCCT GGGGGCCTCC CACCCTCATG ACCACAGACT GTCCTGAGCC TTTGTTGCAG | 1680 |
| CCGTGGTTGG AGGGCTGGCA TGTGGAAGGC ACTGACCGGC TGCGAGTGAG CTGGTCCTTG | 1740 |
| CCCTTGGTGC CCGGGCCACT GGTGGGCGAC GGTTTCCTGC TGCGCCTGTG GGACGGGACA | 1800 |
| CGGGGGCAGG AGCGGCGGGA GAACGTCTCA TCCCCCCAGG CCCGCACTGC CCTCCTGACG | 1860 |
| GGACTCACGC CTGGCACCCA CTACCAGCTG GATGTGCAGC TCTACCACTG CACCCTCCTG | 1920 |
| GGCCCGGCCT CGCCCCCTGC ACACGTGCTT CTGCCCCCCA GTGGGCCTCC AGCCCCCCGA | 1980 |
| CACCTCCACG CCCAGGCCCT CTCAGACTCC GAGATCCAGC TGACATGGAA GCACCCGGAG | 2040 |
| GCTCTGCCTG GGCCAATATC CAAGTACGTT GTGGAGGTGC AGGTGGCTGG GGGTGCAGGA | 2100 |
| GACCCACTGT GGATAGACGT GGACAGGCCT GAGGAGACAA GCACCATCAT CCGTGGCCTC | 2160 |
| AACGCCAGCA CGCGCTACCT CTTCCGCATG CGGGCCAGCA TTCAGGGGCT CGGGGACTGG | 2220 |
| AGCAACACAG TAGAAGAGTC CACCCTGGGC AACGGGCTGC AGGCTGAGGG CCCAGTCCAA | 2280 |
| GAGAGCCGGG CAGCTGAAGA GGGCCTGGAT CAGCAGCTGA TCCTGGCGGT GGTGGGCTCC | 2340 |
| GTGTCTGCCA CCTGCCTCAC CATCCTGGCC GCCCTTTTAA CCCTGGTGTG CATCCGCAGA | 2400 |
| AGCTGCCTGC ATCGGAGACG CACCTTCACC TACCAGTCAG GCTCGGGCGA GGAGACCATC | 2460 |
| CTGCAGTTCA GCTCAGGGAC CTTGACACTT ACCCGGCGGC CAAAACTGCA GCCCGAGCCC | 2520 |
| CTGAGCTACC CAGTGCTAGA GTGGGAGGAC ATCACCTTTG AGGACCTCAT CGGGGAGGGG | 2580 |
| AACTTCGGCC AGGTCATCCG GGCCATGATC AAGAAGGACG GGCTGAAGAT GAACGCAGCC | 2640 |
| ATCAAAATGC TGAAAGAGTA TGCCTCTGAA AATGACCATC GTGACTTTGC GGGAGAACTG | 2700 |
| GAAGTTCTGT GCAAATTGGG GCATCACCCC AACATCATCA ACCTCCTGGG GGCCTGTAAG | 2760 |
| AACCGAGGTT ACTTGTATAT CGCTATTGAA TATGCCCCCT ACGGGAACCT GCTAGATTTT | 2820 |
| CTGCGGAAAA GCCGGGTCCT AGAGACTGAC CCAGCTTTTG CTCGAGAGCA TGGGACAGCC | 2880 |
| TCTACCCTTA GCTCCCGGCA GCTGCTGCGT TTCGCCAGTG ATGCGGCCAA TGGCATGCAG | 2940 |
| TACCTGAGTG AGAAGCAGTT CATCCACAGG GACCTGGCTG CCCGGAATGT GCTGGTCGGA | 3000 |
| GAGAACCTAG CCTCCAAGAT TGCAGACTTC GGCCTTTCTC GGGGAGAGGA GGTTTATGTG | 3060 |
| AAGAAGACGA TGGGGCGTCT CCCTGTGCGC TGGATGGCCA TTGAGTCCCT GAACTACAGT | 3120 |
| GTCTATACCA CCAAGAGTGA TGTCTGGTCC TTTGGAGTCC TTCTTTGGGA GATAGTGAGC | 3180 |
| CTTGGAGGTA CACCCTACTG TGGCATGACC TGTGCCGAGC TCTATGAAAA GCTGCCCCAG | 3240 |
| GGCTACCGCA TGGAGCAGCC TCGAAACTGT GACGATGAAG TGTACGAGCT GATGCGTCAG | 3300 |
| TGCTGGCGGG ACCGTCCCTA TGAGCGACCC CCCTTTGCCC AGATTGCGCT ACAGCTAGGC | 3360 |
| CGCATGCTGG AAGCCAGGAA GGCCTATGTG AACATGTCGC TGTTTGAGAA CTTCACTTAC | 3420 |
| GCGGGCATTG ATGCCACAGC TGAGGAGGCC TGAGCTGCCA TCCAGCCAGA ACGTGGCTCT | 3480 |
| GCTGGCCGGA GCAAACTCTG CTGTCTAACC TGTGACCAGT CTGACCCTTA CAGCCTCTGA | 3540 |
| CTTAAGCTGC CTCAAGGAAT TTTTTTAACT TAAGGGAGAA AAAAAGGGAT CTGGGGATGG | 3600 |
| GGTGGGCTTA GGGGAACTGG GTTCCCATGC TTTGTAGGTG TCTCATAGCT ATCCTGGGCA | 3660 |
| TCCTTCTTTC TAGTTCAGCT GCCCCACAGG TGTGTTTCCC ATCCCACTGC TCCCCCAACA | 3720 |
| CAAACCCCCA CTCCAGCTCC TTCGCTTAAG CCAGCACTCA CACCACTAAC ATGCCCTGTT | 3780 |
| CAGCTACTCC CACTCCCGGC CTGTCATTCA GAAAAAAATA AATGTTCTAA TAAGCTCCAA | 3840 |
| AAAAA | |

ACH3 DNA sequence
Gene name: placental growth factor (PGF; PlGF1; VEGF-related protein)
Unigene number: Hs.2894
Probeset Accession #: X54936
Nucleic Acid Accession #: NM_002632 cluster
Coding sequence: 322-768 (predicted start/stop codons underlined)

| | |
|---|---|
| GGGATTCGGG CCGCCCAGCT ACGGGAGGAC CTGGAGTGGC ACTGGGCGCC CGACGGCA | 60 |
| TCCCCGGGAC CCGCCTGCCC CTCGGCGCCC CGCCCCGCCG GGCCGCTCCC CGTCGGCTTC | 120 |
| CCCAGCCACA GCCTTACCTA CGGGCTCCTG ACTCCGCAAG GCTTCCAGAA GATGCTCGAA | 180 |
| CCACCGGCCG GGGCCTCGGG GCAGCAGTGA GGGAGGCGTC CAGCCCCCCA CTCAGCTCTT | 240 |
| CTCCTCCTGT GCCAGGGGCT CCCCGGGGGA TGAGCATGGT GGTTTTCCCT CGGAGCCCCC | 300 |
| TGGCTCGGGA CGTCTGAGAA GATGCCGGTC ATGAGGCTGT TCCCTTGCTT CCTGCAGCTC | 360 |
| CTGGCCGGGC TGGCGCTGCC TGCTGTGCCC CCCCAGCAGT GGGCCTTGTC TGCTGGGAAC | 420 |
| GGCTCGTCAG AGGTGGAAGT GGTACCCTTC CAGGAAGTGT GGGGCCGCAG CTACTGCCGG | 480 |
| GCGCTGGAGA GGCTGGTGGA CGTCGTGTCC GAGTACCCCA GCGAGGTGGA GCACATGTTC | 540 |
| AGCCCATCCT GTGTCTCCCT GCTGCGCTGC ACCGGCTGCT GCGGCGATGA GAATCTGCAC | 600 |
| TGTGTGCCGG TGGAGACGGC CAATGTCACC ATGCAGCTCC TAAAGATCCG TTCTGGGGAC | 660 |
| CGGCCCTCCT ACGTGGAGCT GACGTTCTCT CAGCACGTTC GCTGCGAATG CCGGCCTCTG | 720 |
| CGGGAGAAGA TGAAGCCGGA AAGGTGCGGC GATGCTGTTC CCCGGAGGTA ACCCACCCCT | 780 |
| TGGAGGAGAG AGACCCCGCA CCCGGCTCGT GTATTTATTA CCGTCACACT CTTCAGTGAC | 840 |
| TCCTGCTGGT ACCTGCCCTC TATTTATTAG CCAACTGTTT CCCTGCTGAA TGCCTCGCTC | 900 |
| CCTTCAAGAC GAGGGGCAGG GAAGGACAGG ACCCTCAGGA ATTCAGTGCC TTCAACAACG | 960 |
| TGAGAGAAAG AGAGAAGCCA GCCACAGACC CCTGGGAGCT TCCGCTTTGA AAGAAGCAAG | 1020 |
| ACACGTGGCC TCGTGAGGGG CAAGCTAGGC CCCAGAGGCC CTGGAGGTCT CCAGGGGCCT | 1080 |
| GCAGAAGGAA AGAAGGGGGC CCTGCTACCT GTTCTTGGGC CTCAGGCTCT GCACAGACAA | 1140 |
| GCAGCCCTTG CTTTCGGAGC TCCTGTCCAA AGTAGGGATG CGGATTCTGC TGGGGCCGCC | 1200 |
| ACGGCCTGGT GGTGGGAAGG CCGGCAGCGG GCGGAGGGGA TTCAGCCACT TCCCCCTCTT | 1260 |
| CTTCTGAAGA TCAGAACATT CAGCTCTGGA GAACAGTGGT TGCCTGGGGG CTTTTGCCAC | 1320 |
| TCCTTGTCCC CCGTGATCTC CCCTCACACT TTGCCATTTG CTTGTACTGG GACATTGTTC | 1380 |
| TTTCCGGCCG AGGTGCCACC ACCCTGCCCC CACTAAGAGA CACATACAGA GTGGGCCCCG | 1440 |
| GGCTGGAGAA AGAGCTGCCT GGATGAGAAA CAGCTCAGCC AGTGGGGATG AGGTCACCAG | 1500 |
| GGGAGGAGCC TGTGCGTCCC AGCTGAAGGC AGTGGCAGGG GAGCAGGTTC CCCAAGGGCC | 1560 |
| CTGGCACCCC CACAAGCTGT CCCTGCAGGG CCATCTGACT GCCAAGCCAG ATTCTCTTGA | 1620 |
| ATAAAGTATT CTAGTGTGGA AACGC | |

ACH4 DNA sequence
Gene name: nidogen 2 (NID2)
Unigene number: Hs.82733
Probeset Accession #: D86425
Nucleic Acid Accession #: NM_007361 cluster
Coding sequence: 1-4131 (predicted start/stop codons underlined)

| | |
|---|---|
| ATGGAGGGGG ACCGGGTGGC CGGGCGGCCG GTGCTGTCGT CGTTACCAGT GCTACTGCTG | 60 |
| CTGCAGTTGC TAATGTTGCG GGCCGCGGCG CTGCACCCAG ACGAGCTCTT CCCACACGGG | 120 |
| GAGTCGTGGT GGGACCAGCT CCTGCAGGAA GGCGACGACG TAAAGCTCAG CCGTGGTGAA | 180 |
| GCTGGCGAAT CCCCTGCACT TCTTACGAAG CCCGATTCAG CAACCTCTAC GTGGGCACCA | 240 |
| ACGGCATCAT CTCCACTCAG GACTTCCCCA GGGAAACGCA GTATGTGGAC TATGATTTCC | 300 |
| CCACCGACTT CCCGGCCATC GCCCCTTTTC TGGCGGACAT CGACACGAGC CACGGCAGAG | 360 |
| GCCGAGTCCT GTACCGAGAG GACACCTCCC CCGCAGTGCT GGGCCTGGCC GCCCGCTATG | 420 |
| TGCGCGCTGG CTTCCCGCGC TCTGCGCGCT TTTTACCCCC ACCCACGCCT TCCTGGCCAC | 480 |
| CTGGGAGCAG GTAGGCGCTT ACGAGGAGGT CAAACGCGGG CGCTGCCCTC GGGAGAGCTG | 540 |
| AACACTTTCC AGGCAGTTTT GGCATCTGAT GGGTCTGATA GCTACGCCCT CTTTCTTTAT | 600 |
| CCTGCCAACG GCCTGCAGTT CCTTGGAACC CGCCCCAAAG AGTCTTACAA TGTCCAGCTT | 660 |
| CAGCTTCCAG CTCGGGTGGG CTTCTGCCGA GGGGAGGCTG ATGATCTGAA GTCAGAAGGA | 720 |
| CCATATTTCA GCTTGACTAG CACTGAACAG TCTGTGAAAA ATCTCTATCA ACTAAGCAAC | 780 |
| CTGGGGATCC CTGGAGTGTG GGCTTTCCAT ATCGGCAGCA CTTCCCCGTT GGACAATGTC | 840 |
| AGGCCAGCTG CAGTTGGAGA CCTTTCCGCT GCCCACTCTT CTGTTCCCCT GGGACGTTCC | 900 |
| TTCAGCCATG CTACAGCCCT GGAAAGTGAC TATAATGAGG ACAATTTGGA TTACTACGAT | 960 |
| GTGAATGAGG AGGAAGCTGA ATACCTTCCG GGTGAACCAG AGGAGGCATT GAATGGCCAC | 1020 |
| AGCAGCATTG ATGTTTCCTT CCAATCCAAA GTGGATACAA AGCCTTTAGA GGAATCTTCC | 1080 |
| ACCTTGGATC CTCACACCAA AGAAGGAACA TCTCTGGGAG AGGTAGGGGG CCCAGATTTA | 1140 |
| AAAGGCCAAG TTGAGCCCTG GGATGAGAGA GAGACCAGAA GCCCAGCTCC ACCAGAGGTA | 1200 |
| GACAGAGATT CACTGGCTCC TTCCTGGGAA ACCCCACCAC CGTACCCCGA AAACGGAAGC | 1260 |
| ATCCAGCCCT ACCCAGATGG AGGGCCAGTG CCTTCGGAAA TGGATGTTCC CCCAGCTCAT | 1320 |
| CCTGAAGAAG AAATTGTTCT TCGAAGTTAC CCTGCTTCAG GTCACACTAC ACCCTTAAGT | 1380 |
| CGAGGGACGT ATGAGGTGGG ACTGGAAGAC AACATAGGTT CCAACACCGA GGTCTTCACG | 1440 |
| TATAATGCTG CCAACAAGGA AACCTGTGAA CACAACCACA GACAATGCTC CCGGCATGCC | 1500 |
| TTCTGCACGG ACTATGCCAC TGGCTTCTGC TGCCACTGCC AATCCAAGTT TTATGGAAAT | 1560 |
| GGGAAGCACT GTCTGCCTGA GGGGGCACCT CACCGAGTGA ATGGGAAAGT GAGTGGCCAC | 1620 |
| CTCCACGTGG GCCATACACC CGTGCACTTC ACTGATGTGG ACCTGCATGC GTATATCGTG | 1680 |
| GGCAATGATG GCAGAGCCTA CACGGCCATC AGCCACATCC CACAGCCAGC AGCCCAGGCC | 1740 |
| CTCCTCCCCC TCACACCAAT TGGAGGCCTG TTTGGCTGGC TCTTTGCTTT AGAAAAACCT | 1800 |
| GGCTCTGAGA ACGGCTTCAG CCTCGCAGGT GCTGCCTTTA CCCATGACAT GGAAGTTACA | 1860 |
| TTACCCGG GAGAGGAGAC GGTTCGTATC ACTCAAACTG CTGAGGGACT TGACCCAGAG | 1920 |
| AACTACCTGA GCATTAAGAC CAACATTCAA GGCCAGGTGC CTTACGTCCC AGCAAATTTC | 1980 |
| ACAGCCCACA TCTCTCCCTA CAAGGAGCTG TACCACTACT CCGACTCCAC TGTGACCTCT | 2040 |
| ACAAGTTCCA GAGACTACTC TCTGACTTTT GGTGCAATCA ACCAAACATG GTCCTACCGC | 2100 |
| ATCCACCAGA ACATCACTTA CCAGGTGTGC AGGCACGCCC CCAGACACCC GTCCTTCCCC | 2160 |
| ACCACCCAGC AGCTGAACGT GGACCGGGTC TTTGCCTTGT ATAATGATGA AGAAAGAGTG | 2220 |
| CTTAGATTTG CTGTGACCAA TCAAATTGGC CCGGTCAAAG AAGATTCAGA CCCCACTCCG | 2280 |
| GTGAATCCTT GCTATGATGG GAGCCACATG TGTGACACAA CAGCACGGTG CCATCCAGGG | 2340 |
| ACAGGTGTAG ATTACACCTG TGAGTGCGCA TCTGGGTACC AGGGAGATGG ACGGAACTGT | 2400 |
| GTGGATGAAA ATGAATGTGC AACTGGCTTT CATCGCTGTG GCCCCAACTC TGTATGTATC | 2460 |
| AACTTGCCTG GAAGCTACAG GTGTGAGTGC CGGAGTGGTT ATGAGTTTGC AGATGACCGG | 2520 |
| CATACTTGCA TCTTGATCAC CCCACCTGCC AACCCCTGTG AGGATGGCAG TCATACCTGT | 2580 |
| GCTCCTGCTG GGCAGGCCCG GTGTGTTCAC CATGGAGGCA GCACGTTCAG CTGTGCCTGC | 2640 |
| CTGCCTGGTT ATGCCGGCGA TGGGCACCAG TGCACTGATG TAGATGAATG CTCAGAAAAC | 2700 |
| AGATGTCACC CTGCAGCTAC CTGCTACAAT ACTCCTGGTT CCTTCTCCTG CCGTTGTCAA | 2760 |
| CCCGGATATT ATGGGGATGG ATTTCAGTGC ATACCTGACT CCACCTCAAG CCTGACACCC | 2820 |
| TGTGAACAAC AGCAGCGCCA TGCCCAGGCC CAGTATGCCT ACCCTGGGGC CCGGTTCCAC | 2880 |
| ATCCCCCAAT GCGACGAGCA GGGCAACTTC CTGCCCCTAC AGTGTCATGG CAGCACTGGT | 2940 |
| TTCTGCTGGT GCGTGGACCC TGATGGTCAT GAAGTTCCTG GTACCCAGAC TCCACCTGGC | 3000 |
| TCCACCCCGC CTCACTGTGG ACCATCACCA GAGCCCACCC AGAGGCCCCC GACCATCTGT | 3060 |
| GAGCGCTGGA GGGAAAACCT GCTGGAGCAC TACGGTGGCA CCCCCCGAGA TGACCAGTAC | 3120 |
| GTGCCCCAGT GCGATGACCT GGGCCACTTC ATCCCCCTGC AGTGCCACGG AAAGAGCGAC | 3180 |
| TTCTGCTGGT GTGTGGACAA AGATGGCAGA GAGGTGCAGG GCACCCGCTC CCAGCCAGGC | 3240 |
| ACCACCCCTG CGTGTATACC CACCGTCGCT CCACCCATGG TCCGGCCCAC GCCCCGGCCA | 3300 |
| GATGTGACCC CTCCATCTGT GGGCACCTTC CTGCTCTATA CTCAGGGCCA GCAGATTGGC | 3360 |
| TACTTACCCC TCAATGGCAC CAGGCTTCAG AAGGATGCAG CTAAGACCCT GCTGTCTCTG | 3420 |
| CATGGCTCCA TAATCGTGGG AATTGATTAC GACTGCCGGG AGAGGATGGT GTACTGGACA | 3480 |
| GATGTTGCTG GACGGACAAT CAGCCGTGCC GGTCTGGAAC TGGGAGCAGA GCCTGAGACG | 3540 |
| ATCGTGAATT CAGGTCTGAT AAGCCCTGAA GGACTTGCCA TAGACCACAT CCGCAGAACA | 3600 |
| ATGTACTGGA CGGACAGTGT CCTGGATAAG ATAGAGAGCG CCCTGCTGGA TGGCTCTGAG | 3660 |
| CGCAAGGTCC TCTTCTACAC AGATCTGGTG AATCCCCGTG CCATCGCTGT GGATCCAATC | 3720 |
| CGAGGCAACT TGTACTGGAC AGACTGGAAT AGAGAAGCTC CTAAAATTGA AACGTCATCT | 3780 |
| TTAGATGGAG AAAACAGAAG AATTCTGATC AATACAGACA TTGGATTGCC CAATGGCTTA | 3840 |
| ACCTTTGACC CTTTCTCTAA ACTGCTCTGC TGGGCAGATG CAGGAACCAA AAAACTGGAG | 3900 |
| TGTACACTAC CTGATGGAAC TGGACGGCGT GTCATTCAAA ACAACCTCAA GTACCCCTTC | 3960 |
| AGCATCGTAA GCTATGCAGA TCACTTCTAC CACACAGACT GGAGGAGGGA TGGTGTTGTA | 4020 |
| TCAGTAAATA AACATAGTGG CCAGTTTACT GATGAGTATC TCCCAGAACA ACGATCTCAC | 4080 |
| CTCTACGGGA TAACTGCAGT CTACCCCTAC TGCCCAACAG GAAGAAAGTA AGTACAGTAA | 4140 |
| TGTAAAGGAA GACTTGGAGT TTACAATCAG AACCTGGACC CTAAAGAACA GTGACTGCAA | 4200 |
| AGGCAAAGAA AGTAAAAAAG GAATTGGCCA TTAGACGTTC CTGAGCATCC AAGATGAACA | 4260 |
| TTTTGTAGTG CAAAAAGACT TTTGTGAAAA GCTGATACCT CAATCTTTAC TACTGTATTT | 4320 |
| TTAAAAATGA AGGTTGTTAT TGCAAGTTTA AAAAGGTAAC AGAATTTTAA CTGTTGCTTA | 4380 |
| TTAAAGCAAC TTCTTGTAAA CATTTATCAT TAATATTTAA AAGATCAAAT TCATTCAACT | 4440 |
| AAGAATTAGA GTTTAAGACT CTAAACCTGA TTTTTGCCAT GGATTCCTTC TGGCCAAGAA | 4500 |
| ATTAAAGCAC ATGTGATCAA TATAACAATA TAATCCTAAA CCTTGACAGT TGGAGAAGCC | 4560 |
| AATGCAGAAC TGATGGGAAA GGACCAATTA TTTATAGTTT CCAAACAAAA GTTCTAAGAT | 4620 |
| TTTTTACCTC TGCATCAGTG CATTTCTATT TATATCAAAA GGTGCTAAAA TGATTCAATT | 4680 |
| TGCATTTTCT GATCCTGTAG TGCCTCTATA GAAGTACCCA CAGAAAGTAA AGTATCACAT | 4740 |
| TTATAAATAC CAAAGATGTA ACAATTTTAA AATTTTCTAG ATTACTCCAA TAAAGTGTTT | 4800 |
| TAAGTTTAAA AAAAAAAAAA AAAAAAAAA | |

ACH5 DNA sequence
Gene name: SNL (singed-like; sea urchin fascin homolog-like)
Unigene number: Hs.118400
Probeset Accession #: U03057
Nucleic Acid Accession #: NM_003088
Coding sequence: 112-1593 (predicted start/stop codons underlined)

| | |
|---|---|
| GCGGAGGGTG CGTGCGGGCC GCGGCAGCCG AACAAAGGAG CAGGGGCGCC GCCGCAGGGA | 60 |
| CCCGCCACCC ACCTCCCGGG GCCGCGCAGC GGCCTCTCGT CTACTGCCAC CATGACCGCC | 120 |
| AACGGCACAG CCGAGGCGGT GCAGATCCAG TTCGGCCTCA TCAACTGCGG CAACAAGTAC | 180 |
| CTGACGGCCG AGGCGTTCGG GTTCAAGGTG AACGCGTCCG CCAGCAGCCT GAAGAAGAAG | 240 |
| CAGATCTGGA CGCTGGAGCA GCCCCCTGAC GAGGCGGGCA GCGCGGCCGT GTGCCTGCGC | 300 |
| AGCCACCTGG GCCGCTACCT GGCGGCGGAC AAGGACGGCA ACGTGACCTG CGAGCGCGAG | 360 |
| GTGCCCGGTC CCGACTGCCG TTTCCTCATC GTGGCGCACG ACGACGGTCG CTGGTCGCTG | 420 |
| CAGTCCGAGG CGCACCGGCG CTACTTCGGC GGCACCGAGG ACCGCCTGTC CTGCTTCGCG | 480 |
| CAGACGGTGT CCCCCGCCGA GAAGTGGAGC GTGCACATCG CCATGCACCC TCAGGTCAAC | 540 |
| ATCTACAGTG TCACCCGTAA GCACTACGCG CACCTGAGCG CGCGGCCGGC CGACGAGATC | 600 |
| GCCGTGGACC GCGACGTGCC CTGGGGCGTC GACTCGCTCA TCACCCTCGC CTTCCAGGAC | 660 |
| CAGCGCTACA GCGTGCAGAC CGCCGACCAC CGCTTCCTGC GCCACGACGG GCGCCTGGTG | 720 |
| GCGCGCCCCG AGCCGGCCAC TGGCTACACG CTGGAGTTCC GCTCCGGCAA GGTGGCCTTC | 780 |
| CGCGACTGCG AGGGCCGTTA CCTGGCGCCG TCGGGGCCCA GCGGCACGCT CAAGGCGGGC | 840 |
| AAGGCCACCA AGGTGGGCAA GGACGAGCTC TTTGCTCTGG AGCAGAGCTG CGCCCAGGTC | 900 |
| GTGCTGCAGG CGGCCAACGA GAGGAACGTG TCCACGCGCC AGGGTATGGA CCTGTCTGCC | 960 |
| AATCAGGACG AGGAGACCGA CCAGGAGACC TTCCAGCTGG AGATCGACCG CGACACCAAA | 1020 |
| AAGTGTGCCT TCCGTACCCA CACGGGCAAG TACTGGACGC TGACGGCCAC CGGGGGCGTG | 1080 |
| CAGTCCACCG CCTCCAGCAA GAATGCCAGC TGCTACTTTG ACATCGAGTG GCGTGACCGG | 1140 |
| CGCATCACAC TGAGGGCGTC CAATGGCAAG TTTGTGACCT CCAAGAAGAA TGGGCAGCTG | 1200 |
| GCCGCCTCGG TGGAGACAGC AGGGGACTCA GAGCTCTTCC TCATGAAGCT CATCAACCGC | 1260 |
| CCCATCATCG TGTTCCGCGG GGAGCATGGC TTCATCGGCT GCCGCAAGGT CACGGGCACC | 1320 |
| CTGGACGCCA ACCGCTCCAG CTATGACGTC TTCCAGCTGG AGTTCAACGA TGGCGCCTAC | 1380 |
| AACATCAAAG ACTCCACAGG CAAATACTGG ACGGTGGGCA GTGACTCCGC GGTCACCAGC | 1440 |
| AGCGGCGACA CTCCTGTGGA CTTCTTCTTC GAGTTCTGCG ACTATAACAA GGTGGCCATC | 1500 |
| AAGGTGGGCG GGCGCTACCT GAAGGGCGAC CACGCAGGCG TCCTGAAGGC CTCGGCGGAA | 1560 |
| ACCGTGGACC CCGCCTCGCT CTGGGAGTAC TAGGGCCGGC CCGTCCTTCC CCGCCCCTGC | 1620 |
| CCACATGGCG GCTCCTGCCA ACCCTCCCTG CTAACCCCTT CTCCGCCAGG TGGGCTCCAG | 1680 |
| GGCGGGAGGC AAGCCCCCTT GCCTTTCAAA CTGGAAACCC CAGAGAAAAC GGTGCCCCCA | 1740 |
| CCTGTCGCCC CTATGGACTC CCCACTCTCC CCTCCGCCCG GGTTCCCTAC TCCCCTCGGG | 1800 |
| TCAGCGGCTG CGGCCTGGCC CTGGGAGGGA TTTCAGATGC CCCTGCCCTC TTGTCTGCCA | 1860 |
| CGGGGCGAGT CTGGCACCTC TTTCTTCTGA CCTCAGACGG CTCTGAGCCT TATTTCTCTG | 1920 |
| GAAGCGGCTA AGGGACGGTT GGGGGCTGGG AGCCCTGGGC GTGTAGTGTA ACTGGAATCT | 1980 |
| TTTGCCTCTC CCAGCCACCT CCTCCCAGCC CCCCAGGAGA GCTGGGCACA TGTCCCAAGC | 2040 |
| CTGTCAGTGG CCCTCCCTGG TGCACTGTCC CCGAAACCCC TGCTTGGGAA GGGAAGCTGT | 2100 |
| CGGGAGGGCT AGGACTGACC CTTGTGGTGT TTTTTTGGGT GGTGGCTGGA AACAGCCCCT | 2160 |
| CTCCCACGTG GGAGAGGCTC AGCCTGGCTC CCTTCCCTGG AGCGGCAGGG CGTGACGGCC | 2220 |
| ACAGGGTCTG CCCGCTGCAC GTTCTGCCAA GGTGGTGGTG GCGGGCGGGT AGGGGTGTGG | 2280 |
| GGGCCGTCTT CCTCCTGTCT CTTTCCTTTC ACCCTAGCCT GACTGGAAGC AGAAAATGAC | 2340 |
| CAAATCAGTA TTTTTTTTAA TGAAATATTA TTGCTGGAGG CGTCCCAGGC AAGCCTGGCT | 2400 |
| GTAGTAGCGA GTGATCTGGC GGGGGGCGTC TCAGCACCCT CCCCAGGGGG TGCATCTCAG | 2460 |
| CCCCCTCTTT CCGTCCTTCC CGTCCAGCCC CAGCCCTGGG CCTGGGCTGC CGACACCTGG | 2520 |
| GCCAGAGCCC CTGCTGTGAT TGGTGCTCCC TGGGCCTCCC GGGTGGATGA AGCCAGGCGT | 2580 |
| CGCCCCCTCC GGGAGCCCTG GGGTGAGCCG CCGGGGCCCC CCTGCTGCCA GCCTCCCCCG | 2640 |
| TCCCCAACAT GCATCTCACT CTGGGTGTCT TGGTCTTTTA TTTTTTGTAA GTGTCATTTG | 2700 |
| TATAACTCTA AACGCCCATG ATAGTAGCTT CAAACTGGAA ATAGCGAAAT AAAATAACTC | 2760 |
| AGTCTGC | |

ACH6 DNA sequence
Gene name: endothelial protein C receptor (EPCR; PROCR)
Unigene number: Hs.82353
Probeset Accession #: L35545
Nucleic Acid Accession #: NM_006404
Coding sequence: 25-741 (predicted start/stop codons underlined)

| | |
|---|---|
| CAGGTCCGGA GCCTCAACTT CAGGATGTTG ACAACATTGC TGCCGATACT GCTGCTGTCT | 60 |
| GGCTGGGCCT TTTGTAGCCA AGACGCCTCA GATGGCCTCC AAAGACTTCA TATGCTCCAG | 120 |
| ATCTCCTACT TCCGCGACCC CTATCACGTG TGGTACCAGG GCAACGCGTC GCTGGGGGGA | 180 |
| CACCTAACGC ACGTGCTGGA AGGCCCAGAC ACCAACACCA CGATCATTCA GCTGCAGCCC | 240 |
| TTGCAGGAGC CCGAGAGCTG GGCGCGCACG CAGAGTGGCC TGCAGTCCTA CCTGCTCCAG | 300 |
| TTCCACGGCC TCGTGCGCCT GGTGCACCAG GAGCGGACCT TGGCCTTTCC TCTGACCATC | 360 |
| CGCTGCTTCC TGGGCTGTGA GCTGCCTCCC GAGGGCTCTA GAGCCCATGT CTTCTTCGAA | 420 |
| GTGGCTGTGA ATGGGAGCTC CTTTGTGAGT TTCCGGCCGG AGAGAGCCTT GTGGCAGGCA | 480 |
| GACACCCAGG TCACCTCCGG AGTGGTCACC TTCACCCTGC AGCAGCTCAA TGCCTACAAC | 540 |
| CGCACTCGGT ATGAACTGCG GGAATTCCTG GAGGACACCT GTGTGCAGTA TGTGCAGAAA | 600 |
| CATATTTCCG CGGAAAACAC GAAAGGGAGC CAAACAAGCC GCTCCTACAC TTCGCTGGTC | 660 |
| CTGGGCGTCC TGGTGGGCGG TTTCATCATT GCTGGTGTGG CTGTAGGCAT CTTCCTGTGC | 720 |
| ACAGGTGGAC GGCGATGTTA ATTACTCTCC AGCCCCGTCA GAAGGGGCTG GATTGATGGA | 780 |
| GGCTGGCAAG GGAAAGTTTC AGCTCACTGT GAAGCCAGAC TCCCCAACTG AAACACCAGA | 840 |
| AGGTTTGGAG TGACAGCTCC TTTCTTCTCC CACATCTGCC CACTGAAGAT TTGAGGGAGG | 900 |
| GGAGATGGAG AGGAGAGGTG GACAAAGTAC TTGGTTTGCT AAGAACCTAA GAACGTGTAT | 960 |
| GCTTTGCTGA ATTAGTCTGA TAAGTGAATG TTTATCTATC TTTGTGGAAA ACAGATAATG | 1020 |
| GAGTTGGGGC AGGAAGCCTA TGCGCCATCC TCCAAAGACA GACAGAATCA CCTGAGGCGT | 1080 |
| TCAAAAGATA TAACCAAATA AACAAGTCAT CCACAATCAA AATACAACAT TCAATACTTC | 1140 |
| CAGGTGTGTC AGACTTGGGA TGGGACGCTG ATATAATAGG GTAGAAAGAA GTAACACGAA | 1200 |
| GAAGTGGTGG AAATGTAAAA TCCAAGTCAT ATGGCAGTGA TCAATTATTA ATCAATTAAT | 1260 |
| AATATTAATA AATTTCTTAT ATTT | |

ACH8 DNA sequence
Gene name: melanoma adhesion molecule (MCAM; MUC18)
Unigene number: Hs.211579
Probeset Accession #: D51069
Nucleic Acid Accession #: NM_006500
Coding sequence: 27-1967 (predicted start and stop codons underlined)

| | |
|---|---|
| ACTTGCGTCT CGCCCTCCGG CCAAGCATGG GGCTTCCCAG GCTGGTCTGC GCCTTCTTGC | 60 |
| TCGCCGCCTG CTGCTGCTGT CCTCGCGTCG CGGGTGTGCC CGGAGAGGCT GAGCAGCCTG | 120 |
| CGCCTGAGCT GGTGGAGGTG GAAGTGGGCA GCACAGCCCT TCTGAAGTGC GGCCTCTCCC | 180 |
| AGTCCCAAGG CAACCTCAGC CATGTCGACT GGTTTTCTGT CCACAAGGAG AAGCGGACGC | 240 |
| TCATCTTCCG TGTGCGCCAG GGCCAGGGCC AGAGCGAACC TGGGGAGTAC GAGCAGCGGC | 300 |
| TCAGCCTCCA GGACAGAGGG GCTACTCTGG CCCTGACTCA AGTCACCCCC CAAGACGAGC | 360 |
| GCATCTTCTT GTGCCAGGGC AAGCGCCCTC GGTCCCAGGA GTACCGCATC CAGCTCCGCG | 420 |
| TCTACAAAGC TCCGGAGGAG CCAAACATCC AGGTCAACCC CCTGGGCATC CCTGTGAACA | 480 |
| GTAAGGAGCC TGAGGAGGTC GCTACCTGTG TAGGGAGGAA CGGGTACCCC ATTCCTCAAG | 540 |
| TCATCTGGTA CAAGAATGGC CGGCCTCTGA AGGAGGAGAA GAACCGGGTC CACATTCAGT | 600 |
| CGTCCCAGAC TGTGGAGTCG AGTGGTTTGT ACACCTTGCA GAGTATTCTG AAGGCACAGC | 660 |
| TGGTTAAAGA AGACAAAGAT GCCCAGTTTT ACTGTGAGCT CAACTACCGG CTGCCCAGTG | 720 |
| GGAACCACAT GAAGGAGTCC AGGGAAGTCA CCGTCCCTGT TTTCTACCCG ACAGAAAAAG | 780 |
| TGTGGCTGGA AGTGGAGCCC GTGGGAATGC TGAAGGAAGG GGACCGCGTG GAAATCAGGT | 840 |
| GTTTGGCTGA TGGCAACCCT CCACCACACT TCAGCATCAG CAAGCAGAAC CCCAGCACCA | 900 |
| GGGAGGCAGA GGAAGAGACA ACCAACGACA ACGGGGTCCT GGTGCTGGAG CCTGCCCGGA | 960 |
| AGGAACACAG TGGGCGCTAT GAATGTCAGG CCTGGAACTT GGACACCATG ATATCGCTGC | 1020 |
| TGAGTGAACC ACAGGAACTA CTGGTGAACT ATGTGTCTGA CGTCCGAGTG AGTCCCGCAG | 1080 |
| CCCCTGAGAG ACAGGAAGGC AGCAGCCTCA CCCTGACCTG TGAGGCAGAG AGTAGCCAGG | 1140 |
| ACCTCGAGTT CCAGTGGCTG AGAGAAGAGA CAGACCAGGT GCTGGAAAGG GGGCCTGTGC | 1200 |
| TTCAGTTGCA TGACCTGAAA CGGGAGGCAG GAGGCGGCTA TCGCTGCGTG GCGTCTGTGC | 1260 |
| CCAGCATACC CGGCCTGAAC CGCACACAGC TGGTCAAGCT GGCCATTTTT GGCCCCCCTT | 1320 |
| GGATGGCATT CAAGGAGAGG AAGGTGTGGG TGAAAGAGAA TATGGTGTTG AATCTGTCTT | 1380 |
| GTGAAGCGTC AGGGCACCCC CGGCCCACCA TCTCCTGGAA CGTCAACGGC ACGGCAAGTG | 1440 |
| AACAAGACCA AGATCCACAG CGAGTCCTGA GCACCCTGAA TGTCCTCGTG ACCCCGGAGC | 1500 |
| TGTTGGAGAC AGGTGTTGAA TGCACGGCCT CCAACGACCT GGGCAAAAAC ACCAGCATCC | 1560 |
| TCTTCCTGGA GCTGGTCAAT TTAACCACCC TCACACCAGA CTCCAACACA ACCACTGGCC | 1620 |
| TCAGCACTTC CACTGCCAGT CCTCATACCA GAGCCAACAG CACCTCCACA GAGAGAAAGC | 1680 |
| TGCCGGAGCC GGAGAGCCGG GGCGTGGTCA TCGTGGCTGT GATTGTGTGC ATCCTGGTCC | 1740 |
| TGGCGGTGCT GGGCGCTGTC CTCTATTTCC TCTATAAGAA GGGCAAGCTG CCGTGCAGGC | 1800 |
| GCTCAGGGAA GCAGGAGATC ACGCTGCCCC CGTCTCGTAA GACCGAACTT GTAGTTGAAG | 1860 |
| TTAAGTCAGA TAAGCTCCCA GAAGAGATGG GCCTCCTGCA GGGCAGCAGC GGTGACAAGA | 1920 |
| GGGCTCCGGG AGACCAGGGA GAGAAATACA TCGATCTGAG GCATTAGCCC CGAATCACTT | 1980 |
| CAGCTCCCTT CCCTGCCTGG ACCATTCCCA GCTCCCTGCT CACTCTTCTC TCAGCCAAAG | 2040 |
| CCTCCAAAGG GACTAGAGAG AAGCCTCCTG CTCCCCTCAC CTGCACACCC CCTTTCAGAG | 2100 |
| GGCCACTGGG TTAGGACCTG AGGACCTCAC TTGGCCCTGC AAGCCGCTTT TCAGGGACCA | 2160 |
| GTCCACCACC ATCTCCTCCA CGTTGAGTGA AGCTCATCCC AAGCAAGGAG CCCCAGTCTC | 2220 |
| CCGAGCGGGT AGGAGAGTTT CTTGCAGAAC GTGTTTTTTC TTTACACACA TTATGGCTGT | 2280 |
| AAATACCTGG CTCCTGCCAG CAGCTGAGCT GGGTAGCCTC TCTGAGCTGG TTTCCTGCCC | 2340 |
| CAAAGGCTGG CTTCCACCAT CCAGGTGCAC CACTGAAGTG AGGACACACC GGAGCCAGGC | 2400 |
| GCCTGCTCAT GTTGAAGTGC GCTGTTCACA CCCGCTCCGG AGAGCACCCC AGCGGCATCC | 2460 |
| AGAAGCAGCT GCAGTGTTGC TGCCACCACC CTCCTGCTCG CCTCTTCAAA GTCTCCTGTG | 2520 |
| ACATTTTTTC TTTGGTCAGA AGCCAGGAAC TGGTGTCATT CCTTAAAAGA TACGTGCCGG | 2580 |
| GGCCAGGTGT GGTGGCTCAC GCCTGTAATC CCAGCACTTT GGGAGGCCGA GGCGGGCGGA | 2640 |
| TCACAAAGTC AGGACGAGAC CATCCTGGCT AACACGGTGA AACCCTGTCT CTACTAAAAA | 2700 |
| TACAAAAAAA AATTAGCTAG GCGTAGTGGT TGGCACCTAT AGTCCCAGCT ACTCGGAAGG | 2760 |
| CTGAAGCAGG AGAATGGTAT GAATCCAGGA GGTGGAGCTT GCAGTGAGCC GAGACCGTGC | 2820 |
| CACTGCACTC CAGCCTGGGC AACACAGCGA GACTCCGTCT CGAGGAAAAA AAAAGAAAAG | 2880 |
| ACGCGTACCT GCGGTGAGGA AGCTGGGCGC TGTTTTCGAG TTCAGGTGAA TTAGCCTCAA | 2940 |
| TCCCCGTGTT CACTTGCTCC CATAGCCCTC TTGATGGATC ACGTAAAACT GAAAGGCAGC | 3000 |
| GGGGAGCAGA CAAAGATGAG GTCTACACTG TCCTTCATGG GGATTAAAGC TATGGTTATA | 3060 |
| TTAGCACCAA ACTTCTACAA ACCAAGCTCA GGGCCCCAAC CCTAGAAGGG CCCAAATGAG | 3120 |
| AGAATGGTAC TTAGGGATGG AAAACGGGGC CTGGCTAGAG CTTCGGGTGT GTGTGTCTGT | 3180 |
| CTGTGTGTAT GCATACATAT GTGTGTATAT ATGGTTTTGT CAGGTGTGTA AATTTGCAAA | 3240 |
| TTGTTTCCTT TATATATGTA TGTATATATA TATATGAAAA TATATATATA TATGAAAAAT | 3300 |
| AAAGCTTAAT TGTCCCAGAA AATCATACAT TGCTTTTTTA TTCTACATGG GTACCACAGG | 3360 |
| AACCTGGGGG CCTGTGAAAC TACAACCAAA AGGCACACAA AACCGTTTCC AGTTGGCAGC | 3420 |
| AGAGATCAGG GGTTACCTCT GCTTCTGAGC AAATGGCTCA AGCTCTACCA GAGCAGACAG | 3480 |
| CTACCCTACT TTTCAGCAGC AAAACGTCCC GTATGACGCA GCACGAAGGG CCTGGCAGGC | 3540 |
| TGTTAGCAGG AGCTATGTCC CTTCCTATCG TTTCCGTCCA CTT | |

ACH9 DNA sequence
Gene name: endothelin-1 (EDN1)
Unigene number: Hs.2271
Probeset Accession #: J05008
Nucleic Acid Accession #: NM_001955
Coding sequence: 337-975 (predicted start/stop codons underlined)

| | |
|---|---|
| GGAGCTGTTT ACCCCCACTC TAATAGGGGT TCAATATAAA AAGCCGGCAG AGAGCTGTCC | 60 |
| AAGTCAGACG CGCCTCTGCA TCTGCGCCAG GCGAACGGGT CCTGCGCCTC CTGCAGTCCC | 120 |
| AGCTCTCCAC CACCGCCGCG TGCGCCTGCA GACGCTCCGC TCGCTGCCTT CTCTCCTGGC | 180 |
| AGGCGCTGCC TTTTCTCCCC GTTAAAGGGC ACTTGGGCTG AAGGATCGCT TTGAGATCTG | 240 |
| AGGAACCCGC AGCGCTTTGA GGGACCTGAA GCTGTTTTTC TTCGTTTTCC TTTGGGTTCA | 300 |
| GTTTGAACGG GAGGTTTTTG ATCCCTTTTT TTCAGAATGG ATTATTTGCT CATGATTTTC | 360 |
| TCTCTGCTGT TTGTGGCTTG CCAAGGAGCT CCAGAAACAG CAGTCTTAGG CGCTGAGCTC | 420 |
| AGCGCGGTGG GTGAGAACGG CGGGGAGAAA CCCACTCCCA GTCCACCCTG GCGGCTCCGC | 480 |
| CGGTCCAAGC GCTGCTCCTG CTCGTCCCTG ATGGATAAAG AGTGTGTCTA CTTCTGCCAC | 540 |
| CTGGACATCA TTTGGGTCAA CACTCCCGAG CACGTTGTTC CGTATGGACT TGGAAGCCCT | 600 |
| AGGTCCAAGA GAGCCTTGGA GAATTTACTT CCCACAAAGG CAACAGACCG TGAGAATAGA | 660 |
| TGCCAATGTG CTAGCCAAAA AGACAAGAAG TGCTGGAATT TTTGCCAAGC AGGAAAAGAA | 720 |
| CTCAGGGCTG AAGACATTAT GGAGAAAGAC TGGAATAATC ATAAGAAAGG AAAAGACTGT | 780 |
| TCCAAGCTTG GGAAAAAGTG TATTTATCAG CAGTTAGTGA GAGGAAGAAA AATCAGAAGA | 840 |
| AGTTCAGAGG AACACCTAAG ACAAACCAGG TCGGAGACCA TGAGAAACAG CGTCAAATCA | 900 |
| TCTTTTCATG ATCCCAAGCT GAAAGGCAAG CCCTCCAGAG AGCGTTATGT GACCCACAAC | 960 |
| CGAGCACATT GGTGACAGAC TTCGGGGCCT GTCTGAAGCC ATAGCCTCCA CGGAGAGCCC | 1020 |
| TGTGGCCGAC TCTGCACTCT CCACCCTGGC TGGGATCAGA GCAGGAGCAT CCTCTGCTGG | 1080 |
| TTCCTGACTG GCAAAGGACC AGCGTCCTCG TTCAAAACAT TCCAAGAAAG GTTAAGGAGT | 1140 |
| TCCCCCAACC ATCTTCACTG GCTTCCATCA GTGGTAACTG CTTTGGTCTC TTCTTTCATC | 1200 |
| TGGGGATGAC AATGGACCTC TCAGCAGAAA CACACAGTCA CATTCGAATT C | |

ACJ1 DNA sequence
Gene name: BMX non-receptor tyrosine kinase
Unigene number: Hs.27372
Probeset Accession #: X83107
Nucleic Acid Accession #: NM_001721
Coding sequence: 34-2061 (predicted start/stop codons underlined)

| | |
|---|---|
| GCAAGCACGG AACAAGCTGA GACGGATGAT AATATGGATA CAAAATCTAT TCTAGAAGAA | 60 |
| CTTCTTCTCA AAAGATCACA GCAAAAGAAG AAAATGTCAC CAAATAATTA CAAAGAACGG | 120 |
| CTTTTTGTTT TGACCAAAAC AAACCTTTCC TACTATGAAT ATGACAAAAT GAAAAGGGGC | 180 |
| AGCAGAAAAG GATCCATTGA AATTAAGAAA ATCAGATGTG TGGAGAAAGT AAATCTCGAG | 240 |
| GAGCAGACGC CTGTAGAGAG ACAGTACCCA TTTCAGATTG TCTATAAAGA TGGGCTTCTC | 300 |
| TATGTCTATG CATCAAATGA AGAGAGCCGA AGTCAGTGGT TGAAAGCATT ACAAAAAGAG | 360 |
| ATAAGGGGTA ACCCCCACCT GCTGGTCAAG TACCATAGTG GGTTCTTCGT GGACGGGAAG | 420 |
| TTCCTGTGTT GCCAGCAGAG CTGTAAAGCA GCCCCAGGAT GTACCCTCTG GGAAGCATAT | 480 |
| GCTAATCTGC ATACTGCAGT CAATGAAGAG AAACACAGAG TTCCCACCTT CCCAGACAGA | 540 |
| GTGCTGAAGA TACCTCGGGC AGTTCCTGTT CTCAAAATGG ATGCACCATC TTCAAGTACC | 600 |
| ACTCTAGCCC AATATGACAA CGAATCAAAG AAAAACTATG GCTCCCAGCC ACCATCTTCA | 660 |
| AGTACCAGTC TAGCGCAATA TGACAGCAAC TCAAAGAAAA TCTATGGCTC CCAGCCAAAC | 720 |
| TTCAACATGC AGTATATTCC AAGGGAAGAC TTCCCTGACT GGTGGCAAGT AAGAAAACTG | 780 |
| AAAAGTAGCA GCAGCAGTGA AGATGTTGCA AGCAGTAACC AAAAAGAAAG AAATGTGAAT | 840 |
| CACACCACCT CAAAGATTTC ATGGGAATTC CCTGAGTCAA GTTCATCTGA AGAAGAGGAA | 900 |
| AACCTGGATG ATTATGACTG GTTTGCTGGT AACATCTCCA GATCACAATC TGAACAGTTA | 960 |
| CTCAGACAAA AGGGAAAAGA AGGAGCATTT ATGGTTAGAA ATTCGAGCCA AGTGGGAATG | 1020 |
| TACACAGTGT CCTTATTTAG TAAGGCTGTG AATGATAAAA AAGGAACTGT CAAACATTAC | 1080 |
| CACGTGCATA CAAATGCTGA GAACAAATTA TACCTGGCAG AAAACTACTG TTTTGATTCC | 1140 |
| ATTCCAAAGC TTATTCATTA TCATCAACAC AATTCAGCAG GCATGATCAC ACGGCTCCGC | 1200 |
| CACCCTGTGT CAACAAAGGC CAACAAGGTC CCCGACTCTG TGTCCCTGGG AAATGGAATC | 1260 |
| TGGGAACTGA AAAGAGAAGA GATTACCTTG TTGAAGGAGC TGGGAAGTGG CCAGTTTGGA | 1320 |
| GTGGTCCAGC TGGGCAAGTG GAAGGGGCAG TATGATGTTG CTGTTAAGAT GATCAAGGAG | 1380 |
| GGCTCCATGT CAGAAGATGA ATTCTTTCAG GAGGCCCAGA CTATGATGAA ACTCAGCCAT | 1440 |
| CCCAAGCTGG TTAAATTCTA TGGAGTGTGT TCAAAGGAAT ACCCCATATA CATAGTGACT | 1500 |
| GAATATATAA GCAATGGCTG CTTGCTGAAT TACCTGAGGA GTCACGGAAA AGGACTTGAA | 1560 |
| CCTTCCCAGC TCTTAGAAAT GTGCTACGAT GTCTGTGAAG GCATGGCCTT CTTGGAGAGT | 1620 |
| CACCAATTCA TACACCGGGA CTTGGCTGCT CGTAACTGCT TGGTGGACAG AGATCTCTGT | 1680 |
| GTGAAAGTAT CTGACTTTGG AATGACAAGG TATGTTCTTG ATGACCAGTA TGTCAGTTCA | 1740 |
| GTCGGAACAA AGTTTCCAGT CAAGTGGTCA GCTCCAGAGG TGTTTCATTA CTTCAAATAC | 1800 |
| AGCAGCAAGT CAGACGTATG GGCATTTGGG ATCCTGATGT GGGAGGTGTT CAGCCTGGGG | 1860 |
| AAGCAGCCCT ATGACTTGTA TGACAACTCC CAGGTGGTTC TGAAGGTCTC CCAGGGCCAC | 1920 |
| AGGCTTTACC GGCCCCACCT GGCATCGGAC ACCATCTACC AGATCATGTA CAGCTGCTGG | 1980 |
| CACGAGCTTC CAGAAAAGCG TCCCACATTT CAGCAACTCC TGTCTTCCAT TGAACCACTT | 2040 |
| CGGGAAAAAG ACAAGCATTG AAGAAGAAAT TAGGAGTGCT GATAAGAATG AATATAGATG | 2100 |
| CTGGCCAGCA TTTTCATTCA TTTTAAGGAA AGTAGGAAGG CATAAGTAAT TTTAGCTAGT | 2160 |
| TTTTAATAGT GTTCTCTGTA TTGTCTATTA TTTAGAAATG AACAAGGCAG GAAACAAAAG | 2220 |
| ATTCCCTTGA AATTTAGATC AAATTAGTAA TTTTGTTTTA TGCTGCTCCT GATATAACAC | 2280 |
| TTTCCAGCCT ATAGCAGAAG CACATTTTCA GACTGCAATA TAGAGACTGT GTTCATGTGT | 2340 |
| AAAGACTGAG CAGAACTGAA AAATTACTTA TTGGATATTC ATTCTTTTCT TTATATTGTC | 2400 |
| ATTGTCACAA CAATTAAATA TACTACCAAG TACAGAAATG TGGAAAAAAA AAACCG | |

ACJ4 DNA sequence
Gene name: prostaglandin G/H synthase 2 (COX-2; PGHS-2)
Unigene number: Hs.196384
Probeset Accession #: D28235
Nucleic Acid Accession #: NM_000963
Coding sequence: 135-1949 (predicted start/stop codons underlined)

| | |
|---|---|
| CAATTGTCAT ACGACTTGCA GTGAGCGTCA GGAGCACGTC CAGGAACTCC TCAGCAGCGC | 60 |
| CTCCTTCAGC TCCACAGCCA GACGCCCTCA GACAGCAAAG CCTACCCCCG CGCCGCGCCC | 120 |
| TGCCCGCCGC TCGGATGCTC GCCCGCGCCC TGCTGCTGTG CGCGGTCCTG GCGCTCAGCC | 180 |
| ATACAGCAAA TCCTTGCTGT TCCCACCCAT GTCAAAACCG AGGTGTATGT ATGAGTGTGG | 240 |
| GATTTGACCA GTATAAGTGC GATTGTACCC GGACAGGATT CTATGGAGAA AACTGCTCAA | 300 |
| CACCGGAATT TTTGACAAGA ATAAAATTAT TTCTGAAACC CACTCCAAAC ACAGTGCACT | 360 |
| ACATACTTAC CCACTTCAAG GGATTTTGGA ACGTTGTGAA TAACATTCCC TTCCTTCGAA | 420 |
| ATGCAATTAT GAGTTATGTC TTGACATCCA GATCACATTT GATTGACAGT CCACCAACTT | 480 |
| ACAATGCTGA CTATGGCTAC AAAAGCTGGG AAGCCTTCTC TAACCTCTCC TATTATACTA | 540 |
| GAGCCCTTCC TCCTGTGCCT GATGATTGCC CGACTCCCTT GGGTGTCAAA GGTAAAAAGC | 600 |
| AGCTTCCTGA TTCAAATGAG ATTGTGGAAA AATTGCTTCT AAGAAGAAAG TTCATCCCTG | 660 |
| ATCCCCAGGG CTCAAACATG ATGTTTGCAT TCTTTGCCCA GCACTTCACG CATCAGTTTT | 720 |
| TCAAGACAGA TCATAAGCGA GGGCCAGCTT TCACCAACGG GCTGGGCCAT GGGGTGGACT | 780 |
| TAAATCATAT TTACGGTGAA ACTCTGGCTA GACAGCGTAA ACTGCGCCTT TTCAAGGATG | 840 |
| GAAAAATGAA ATATCAGATA ATTGATGGAG AGATGTATCC TCCCACAGTC AAAGATACTC | 900 |
| AGGCAGAGAT GATCTACCCT CCTCAAGTCC CTGAGCATCT ACGGTTTGCT GTGGGGCAGG | 960 |
| AGGTCTTTGG TCTGGTGCCT GGTCTGATGA TGTATGCCAC AATCTGGCTG CGGGAACACA | 1020 |
| ACAGAGTATG CGATGTGCTT AAACAGGAGC ATCCTGAATG GGGTGATGAG CAGTTGTTCC | 1080 |
| AGACAAGCAG GCTAATACTG ATAGGAGAGA CTATTAAGAT TGTGATTGAA GATTATGTGC | 1140 |
| AACACTTGAG TGGCTATCAC TTCAAACTGA AATTTGACCC AGAACTACTT TTCAACAAAC | 1200 |
| AATTCCAGTA CCAAAATCGT ATTGCTGCTG AATTTAACAC CCTCTATCAC TGGCATCCCC | 1260 |
| TTCTGCCTGA CACCTTTCAA ATTCATGACC AGAAATACAA CTATCAACAG TTTATCTACA | 1320 |
| ACAACTCTAT ATTGCTGGAA CATGGAATTA CCCAGTTTGT TGAATCATTC ACCAGGCAAA | 1380 |
| TTGCTGGCAG GGTTGCTGGT GGTAGGAATG TTCCACCCGC AGTACAGAAA GTATCACAGG | 1440 |
| CTTCCATTGA CCAGAGCAGG CAGATGAAAT ACCAGTCTTT TAATGAGTAC CGCAAACGCT | 1500 |
| TTATGCTGAA GCCCTATGAA TCATTTGAAG AACTTACAGG AGAAAAGGAA ATGTCTGCAG | 1560 |
| AGTTGGAAGC ACTCTATGGT GACATCGATG CTGTGGAGCT GTATCCTGCC CTTCTGGTAG | 1620 |
| AAAAGCCTCG GCCAGATGCC ATCTTTGGTG AAACCATGGT AGAAGTTGGA GCACCATTCT | 1680 |
| CCTTGAAAGG ACTTATGGGT AATGTTATAT GTTCTCCTGC CTACTGGAAG CCAAGCACTT | 1740 |
| TTGGTGGAGA AGTGGGTTTT CAAATCATCA ACACTGCCTC AATTCAGTCT CTCATCTGCA | 1800 |
| ATAACGTGAA GGGCTGTCCC TTTACTTCAT TCAGTGTTCC AGATCCAGAG CTCATTAAAA | 1860 |
| CAGTCACCAT CAATGCAAGT TCTTCCCGCT CCGGACTAGA TGATATCAAT CCCACAGTAC | 1920 |
| TACTAAAAGA ACGTTCGACT GAACTGTAGA AGTCTAATGA TCATATTTAT TTATTTATAT | 1980 |
| GAACCATGTC TATTAATTTA ATTATTTAAT AATATTTATA TTAAACTCCT TATGTTACTT | 2040 |
| AACATCTTCT GTAACAGAAG TCAGTACTCC TGTTGCGGAG AAAGGAGTCA TACTTGTGAA | 2100 |
| GACTTTTATG TCACTACTCT AAAGATTTTG CTGTTGCTGT TAAGTTTGGA AAACAGTTTT | 2160 |
| TATTCTGTTT TATAAACCAG AGAGAAATGA GTTTTGACGT CTTTTTACTT GAATTTCAAC | 2220 |
| TTATATTATA AGAACGAAAG TAAAGATGTT TGAATACTTA AACACTATCA CAAGATGGCA | 2280 |
| AAATGCTGAA AGTTTTTACA CTGTCGATGT TTCCAATGCA TCTTCCATGA TGCATTAGAA | 2340 |
| GTAACTAATG TTTGAAATTT TAAAGTACTT TTGGTTATTT TTCTGTCATC AAACAAAAAC | 2400 |
| AGGTATCAGT GCATTATTAA ATGAATATTT AAATTAGACA TTACCAGTAA TTTCATGTCT | 2460 |
| ACTTTTTAAA ATCAGCAATG AAACAATAAT TTGAAATTTC TAAATTCATA GGGTAGAATC | 2520 |
| ACCTGTAAAA GCTTGTTTGA TTTCTTAAAG TTATTAAACT TGTACATATA CCAAAAAGAA | 2580 |
| GCTGTCTTGG ATTTAAATCT GTAAAATCAG ATGAAATTTT ACTACAATTG CTTGTTAAAA | 2640 |
| TATTTTAAAA GTGATGTTCC TTTTTCACCA AGAGTATAAA CCTTTTTAGT GTGACTGTTA | 2700 |
| AAACTTCCTT TTAAATCAAA ATGCCAAATT TATTAAGGTG GTGGAGCCAC TGCAGTGTTA | 2760 |
| TCTCAAAATA AGAATATTTT GTTGAGATAT TCCAGAATTT GTTTATATGG CTGGTAACAT | 2820 |
| GTAAAATCTA TATCAGCAAA AGGGTCTACC TTTAAAATAA GCAATAACAA AGAAGAAAAC | 2880 |
| CAAATTATTG TTCAAATTTA GGTTTAAACT TTTGAAGCAA ACTTTTTTTT ATCCTTGTGC | 2940 |
| ACTGCAGGCC TGGTACTCAG ATTTTGCTAT GAGGTTAATG AAGTACCAAG CTGTGCTTGA | 3000 |
| ATAACGATAT GTTTTCTCAG ATTTTCTGTT GTACAGTTTA ATTTAGCAGT CCATATCACA | 3060 |
| TTGCAAAAGT AGCAATGACC TCATAAAATA CCTCTTCAAA ATGCTTAAAT TCATTTCACA | 3120 |
| CATTAATTTT ATCTCAGTCT TGAAGCCAAT TCAGTAGGTG CATTGGAATC AAGCCTGGCT | 3180 |
| ACCTGCATGC TGTTCCTTTT CTTTTCTTCT TTTAGCCATT TTGCTAAGAG ACACAGTCTT | 3240 |
| CTCATCACTT CGTTTCTCCT ATTTTGTTTT ACTAGTTTTA AGATCAGAGT TCACTTTCTT | 3300 |
| TGGACTCTGC CTATATTTTC TTACCTGAAC TTTTGCAAGT TTTCAGGTAA ACCTCAGCTC | 3360 |
| AGGACTGCTA TTTAGCTCCT CTTAAGAAGA TTAAAAGAGA AAAAAAAAGG CCCTTTTAAA | 3420 |
| AATAGTATAC ACTTATTTTA AGTGAAAAGC AGAGAATTTT ATTTATAGCT AATTTTAGCT | 3480 |
| ATCTGTAACC AAGATGGATG CAAAGAGGCT AGTGCCTCAG AGAGAACTGT ACGGGGTTTG | 3540 |
| TGACTGGAAA AAGTTACGTT CCCATTCTAA TTAATGCCCT TTCTTATTTA AAAACAAAAC | 3600 |
| CAAATGATAT CTAAGTAGTT CTCAGCAATA ATAATAATGA CGATAATACT TCTTTTCCAC | 3660 |
| ATCTCATTGT CACTGACATT TAATGGTACT GTATATTACT TAATTTATTG AAGATTATTA | 3720 |
| TTTATGTCTT ATTAGGACAC TATGGTTATA AACTGTGTTT AAGCCTACAA TCATTGATTT | 3780 |
| TTTTTTGTTA TGTCACAATC AGTATATTTT CTTTGGGGTT ACCTCTCTGA ATATTATGTA | 3840 |
| AACAATCCAA AGAAATGATT GTATTAAGAT TTGTGAATAA ATTTTTAGAA ATCTGATTGG | 3900 |
| CATATTGAGA TATTTAAGGT TGAATGTTTG TCCTTAGGAT AGGCCTATGT GCTAGCCCAC | 3960 |
| AAAGAATATT GTCTCATTAG CCTGAATGTG CCATAAGACT GACCTTTTAA AATGTTTTGA | 4020 |
| GGGATCTGTG GATGCTTCGT TAATTTGTTC AGCCACAATT TATTGAGAAA ATATTCTGTG | 4080 |
| TCAAGCACTG TGGGTTTTAA TATTTTTAAA TCAAACGCTG ATTACAGATA ATAGTATTTA | 4140 |
| TATAAATAAT TGAAAAAAAT TTTCTTTTGG GAAGAGGGAG AAAATGAAAT AAATATCATT | 4200 |
| AAAGATAACT CAGGAGAATC TTCTTTACAA TTTTACGTTT AGAATGTTTA AGGTTAAGAA | 4260 |
| AGAAATAGTC AATATGCTTG TATAAAACAC TGTTCACTGT TTTTTTTAAA AAAAAAACTT | 4320 |
| GATTTGTTAT TAACATTGAT CTGCTGACAA AACCTGGGAA TTTGGGTTGT GTATGCGAAT | 4380 |
| GTTTCAGTGC CTCAGACAAA TGTGTATTTA ACTTATGTAA AAGATAAGTC TGGAAATAAA | 4440 |
| TGTCTGTTTA TTTTTGTACT ATTTA | |

ACJ6 DNA sequence
Gene name: SEC14-like-1
Unigene number: Hs.75232
Probeset Accession #: D67029
Nucleic Acid Accession #: NM_003003
Coding sequence: 304-2451 (predicted start/stop codons underlined

| | |
|---|---|
| CAAGTGCCGT CGCCGCGCCC CTTCCCCCTC CCGCCTCCCC GGCCCCCTCC CCGGAACCGG | 60 |
| CGGTCGAGCT ACGGTCGCGG ACGAGTGGAA CCGAGACTGC CCCGCGGAGC CGCCGGTATG | 120 |
| AGCGCCCCTC GCCACCCCGT GTCCCAGGCC CGGCCTTTCT GACAAGAGCT AGACTTCGGG | 180 |
| CTCCTTGAGG ATATTCAGTT TTGTATGTTT GAATATCCTC TCACCATGTT CAGCATAAAG | 240 |
| TACCATTCTT AATGATTATC CTCAACAAGA CAGGTGTGAG AGGGTTGCTG TTGCATTGCA | 300 |
| ATCATGGTGC AAAAATACCA GTCCCCAGTG AGAGTGTACA AATACCCCTT TGAATTAATT | 360 |
| ATGGCTGCCT ATGAAAGGAG GTTCCCTACA TGTCCTTTGA TTCCGATGTT CGTGGGCAGT | 420 |
| GACACTGTGA GTGAATTCAA GAGCGAAGAT GGGGCTATTC ATGTCATTGA AAGGCGCTGC | 480 |
| AAGCTGGATG TAGATGCACC GAGACTGCTG AAGAAGATTG CAGGAGTTGA TTATGTTTAT | 540 |
| TTTGTCCAGA AAAACTCACT GAATTCTCGG GAACGTACTT TGCACATTGA GGCTTATAAT | 600 |
| GAAACGTTTT CCAATCGGGT CATCATTAAT GAGCATTGCT GCTACACCGT TCACCCTGAA | 660 |
| AATGAAGATT GGACCTGTTT TGAACAGTCT GCAAGTTTAG ATATTAAATC TTTCTTTGGT | 720 |
| TTTGAAAGTA CAGTGGAAAA AATTGCAATG AAACAATATA CCAGCAACAT TAAAAAAGGA | 780 |
| AAGGAAATCA TCGAATACTA CCTTCGCCAA TTAGAAGAAG AAGGCATAAC CTTTGTGCCC | 840 |
| CGTTGGAGTC CGCCTTCCAT CACGCCCTCT TCAGAGACAT CTTCATCATC CTCCAAGAAA | 900 |
| CAAGCAGCGT CCATGGCCGT CGTCATCCCA GAAGCTGCCC TCAAGGAGGG GCTGAGTGGT | 960 |
| GATGCCCTCA GCAGCCCCAG TGCACCTGAG CCCGTGGTGG GCACCCCTGA CGACAAACTA | 1020 |
| GATGCCGACC ACATCAAGAG ATACCTGGGC GATTTGACTC CGCTGCAGGA GAGCTGCCTC | 1080 |
| ATTAGACTTC GCCAGTGGCT CCAGGAGACC CACAAGGGCA AAATTCCAAA AGATGAGCAT | 1140 |
| ATTCTTCGGT TCCTCCGTGC ACGGGATTTT AATATTGACA AAGCCAGAGA GATCATGTGT | 1200 |
| CAGTCTTTGA CGTGGAGAAA GCAGCATCAG GTAGACTACA TTCTTGAAAC CTGGACCCCT | 1260 |
| CCTCAGGTCC TTCAGGATTA CTACGCGGGA GGCTGGCATC ATCACGACAA AGATGGGCGG | 1320 |
| CCCCTCTACG TGCTCAGGCT GGGGCAGATG GACACCAAAG GCTTGGTGAG AGCGCTCGGG | 1380 |
| GAGGAAGCCC TGCTGAGATA CGTTCTCTCC GTAAATGAAG AACGGCTAAG GCGATGCGAA | 1440 |
| GAGAATACAA AAGTCTTTGG TCGGCCTATC AGCTCATGGA CCTGCCTGGT GGACTTGGAA | 1500 |
| GGGCTGAACA TGCGCCACTT GTGGAGACCT GGTGTGAAAG CGCTGCTGCG GATCATCGAG | 1560 |
| GTGGTGGAGG CCAACTACCC TGAGACACTG GGCCGCCTTC TCATCCTGCG GGCGCCCAGG | 1620 |
| GTATTTCCTG TGCTCTGGAC GCTGGTTAGT CCGTTCATTG ATGACAACAC CAGAAGGAAG | 1680 |
| TTCCTCATTT ATGCAGGAAA TGACTACAG GGTCCTGGAG GCCTGCTGGA TTACATCGAC | 1740 |
| AAAGAGATTA TTCCAGATTT CCTGAGTGG GAGTGCATGT GCGAAGTGCC AGAGGGTGGA | 1800 |
| CTGGTCCCCA AATCTCTGTA CCGGACTGCA GAGGAGCTGG AGAACGAAGA CCTGAAGCTC | 1860 |
| TGGACTGAGA CCATCTACCA GTCTGCAAGC GTCTTCAAAG GAGCCCCACA TGAGATTCTC | 1920 |
| ATTCAGATTG TGGATGCCTC GTCAGTCATC ACTTGGGATT TCGACGTGTG CAAAGGGGAC | 1980 |
| ATTGTGTTTA ACATCTATCA CTCCAAGAGG TCGCCACAAC CACCCAAAAA GGACTCCCTG | 2040 |
| GGAGCCCACA GCATCACCTC TCCGGGTGGG AACAATGTGC AGCTCATAGA CAAAGTCTGG | 2100 |
| CAGCTGGGCC GCGACTACAG CATGGTGGAG TCGCCTCTGA TCTGCAAAGA AGGAGAAAGC | 2160 |
| GTGCAGGGTT CCCATGTGAC CAGGTGGCCG GGCTTCTACA TCCTGCAGTG GAAATTCCAC | 2220 |
| AGCATGCCTG CGTGCGCCGC CAGCAGCCTT CCCCGGGTGG ACGACGTGCT TGCGTCCCTG | 2280 |
| CAGGTCTCTT CGCACAAGTG TAAAGTGATG TACTACACCG AGGTGATCGG CTCGGAGGAT | 2340 |
| TTCAGAGGTT CCATGACGAG CCTGGAGTCC AGCCACAGCG GCTTCTCCCA GCTGAGTGCC | 2400 |
| GCCACCACCT CCTCCAGCCA GTCCCACTCC AGCTCCATGA TCTCCAGGTA GTGCCGCGCT | 2460 |
| GCCTGCACCT AGTGTGCAGA GGGGACGGCC GCCCCTCCTC GGACAGCAGC TGCACCCGCC | 2520 |
| CACCCAGCGG CGACATTGTA CAGACTCCTC TCACCTCTAG ATAGCAAATA GCTCTCAGAT | 2580 |
| GGTAAACGTA GTCGTTTGAT CCCAAAACTA CCTTGGCAGG TAGTTTTAAC TCTGATCCTA | 2640 |
| ACTTAACTCA ATAGCCATAG ATTTTGTATA CGTTGTGCAC AAAATCCAAC CAGAGCGCAA | 2700 |
| GGGCTCTCTT GAAAGAAAAG TAGTTTCTGT ACCAATTAAA GGATTGACGT GGTCTCAGAT | 2760 |
| ATTGATGCAA AAAATTTTTC CAACGAACTC CGCATTGTCC ATTAGTGAAT GAATTCCTGT | 2820 |
| GACATCCTCC AGAGATGGCC CCTCCTCACC TGGGACGGAA GCTGCCAGCT CGCTTCCCCC | 2880 |
| AAGCTGCCTC ATGGCCCGCA CGCCGCCTCA CGGCCCCCAT GCTTCCCGCC AGTCAAGATG | 2940 |
| GTCTGTGGAC TTAGGGCCAG CCCTTGAGGT CCTTATCCTC TGAGGATTCA GAGGTTGCCT | 3000 |
| GCGGAGTACC TTGTCCCAGG GCCAGACACA CCCACACCAC CCACTGTCTG CAGTGGGGCC | 3060 |
| GGGGGCTCAG GAGGGGCTCT CAGGGACTCC TGGTGACTCC AGGAAAATGC TGCCATCGTT | 3120 |
| AAACATTACT TTCTCTTTCC TCCTTTTCAA ATCTTTTTGA TACTTTTTAG AGCAGGATTT | 3180 |
| TTCTGTATGT GAACTTGGGT GGGGGGGTTC TTCCCGTTTC CTTCCGTGCG TCGCCCCTCT | 3240 |
| CACCTGCAGT CAGCTCCCAG CCCAGTGTAG GCCATCTCCT CTGTGCCCTC TGGAGGCTCA | 3300 |
| TTGTCTCAGA GCCCAGACAG TTCCAGCCAC TAGGAGGCCG TCTTGGAACC AGCAAGTCGC | 3360 |
| ATTTGCCACT TGACACTGTC CATGGGGTTT TATTAGTAGC TAAGCAGCAG CTCTCGCATC | 3420 |
| CACTTCAGGG TGGCGTGTGG CATGTAGGAG TCCTGCTTCT TTGTACATGG GAATTGTGGA | 3480 |
| CTCATGCGTG TGTGTGTGTG CATGTGCTGT GTGTGTGCAT GTGTGCATGA CGGTGGGGGT | 3540 |
| GCTGGGGGGA CGGGGTGAGT GGAAACTTAG TTTGAGTAAT GAAGGAATCT TCACAGAAGC | 3600 |
| AAATCAGAAT ATGGGATTTG TTTGCCTTTT ACATTTTGTT TAATTCCTGA TTTTAAAGCC | 3660 |
| TGCTCTATCT GGTACAGGCC CTTATTTTTT CAGCTTTTTA TGGGAAAAGC AGGTTATTTG | 3720 |
| AGAATCTGTC CAGAAGTTGC ATAGGGGATG GCCTCCACGA TAAGGACATG CAACACGTGT | 3780 |
| TTCTGTGTGC AGCAGAGGCC GTGTTTTTCA TGCCAAACCC CACGCGGCTG TCAACTGTGT | 3840 |
| GCGTGGTAGG CATGGAGATC CTGGTTGTGC CGTCTCAGCT CCGCTCTGAA GGCACTGTGT | 3900 |
| GGGTGCTGCG TGACTGGAGA GCTGTGTGGA GGCCATGTGT GCCCCGTGCA GGGATCAGGA | 3960 |
| GGGCGGGGGA GGGACCGAGC AGCCCTCTTG CCCGGTCGGG TCAGCCCTAG TGGCTGCCTG | 4020 |
| CACACTGTAG ACGTCCCAGG GCCTGTGCTG TGATCACCTG CCTTTGGACC ACATTTGTGT | 4080 |
| TTGCTCTTAG AGATCGAGCT CCTCAGTGGT ACCTGAAGCC TTTGCTTCCG GAAAGCGCGG | 4140 |
| TAGGGTTCGT AGGTAGGGCT AGTAGGTAGG GTTAGTAGGT AGGGCTAGTA GGTAGGGCTA | 4200 |
| GTAGGTAGGG TTAGTAGGTA GGGTTCGTAG GTAGGGCTGG TAGGTAGGGT TAGTAGGTAG | 4260 |
| GGCTAGTAGG TAGGGTTCGT AGGTAGGGCT AGTAGGTAGG GTTAGTAGGT AGGGCTAGTA | 4320 |
| GGTAGGGCTA GTAGGTAGGG TTAGTAGGTA GGGTTCGTAG GTAGGGCTGG TAGGTAGGGT | 4380 |
| TAGTAGGTAG GGCTAGTAGG TAGGGTTCGT AGGTAGGGCT AGTAGGTAGG GTTAGTAGGT | 4440 |
| AGGGCTAGTA GGTAGGGCTA GTAGGTAGGG TTAGTAGGTA GGGTTCGTAG GTAGGGCTGG | 4500 |
| TAGGTAGGGT TAGTAGGTAG GGCTAGTAGG TAGGGCTAGT AGGTAGGGCT AGTAGGTAGG | 4560 |
| GTTAGTAGGT AGGGCTAGTA GGTAGGGCTA GTAGGTAGGG TTAGTAGGTA GGGTTCGTAG | 4620 |
| GTAGGGCTGG TAGGTAGGGT TAGTAGGTAG GGCTAGTAGG TAGGGCTAGT AGGTAGGGCT | 4680 |
| AGTAGGTAGG GCTAGTAGGT AGGGCTAGTA GGTAGGGCTA GTAGGTAGGG CTAGTAGGTA | 4740 |
| GGGTTCGTAG GTAGGGTTCG TAGGTAGGGT TCGTAGGTAG GGTTAGTAGC GCGTCTGTGC | 4800 |
| TGCTTCCACC TGGTGCTTCC TGTTCCCAAA TCACAAGGGC CTGAAGGTGG TCCCTGCTTT | 4860 |
| CTCTTTCTCT TTCTCTGTGT CTCAGATGGC GATTTTGCTG ACAGCTGCCA AGAAAATGCT | 4920 |
| TCACTCAACA GTCCTCATGT GCCCAGAGAT GTTTATAGAA CTGTTTGAAT TGCAGCCATC | 4980 |
| CCCTGCCCCC TCCCAGGCTG AAGATCTGTT CTTTTTAAGT TGATTCGGGA GTGGCATTCT | 5040 |
| TTTATACCCA AAGACTGTAG TGCATCTTGA AGAGCTCAAA GCACATGACC GCACAAATGC | 5100 |
| TTACAGGGTT TCCTCCCGAG TAATCCAATC TCACTCCCCT TGTAAGGGAA TTCTGGGGCA | 5160 |
| GCTATGGTTT GAGTATGCAG TTTGCATCGT GTTTCTACCT TTAGTACCTT GCCACTCTTT | 5220 |
| TAAAACGCTG CTGTCATTTC CCATTTCTTA GTACTAATGA TTCTTTGATT CTCCCTCTAT | 5280 |
| TATGTCTTAA TTCACTTTCC TTCCTAAATT TGTTATTTGC ATATCAAATT CTGTAAATGT | 5340 |
| TTTGTAAAGA TATTACCTCA CTTGGTAATA CAATACTGAT AGTCTTTAAA AGATTTTTTT | 5400 |
| ATTGTTATCA ATAATAAATG TGAACTATTT AAAG | |

ACJ8 DNA sequence
Gene name: intercellular adhesion molecule 1 (ICAM1; CD54)
Unigene number: Hs.168383
Probeset Accession #: M24283
Nucleic Acid Accession #: NM_000201
Coding sequence: 58-1656 (predicted start/stop codons underlined)

| | |
|---|---|
| GCGCCCCAGT CGACGCTGAG CTCCTCTGCT ACTCAGAGTT GCAACCTCAG CCTCGCTATG | 60 |
| GCTCCCAGCA GCCCCCGGCC CGCGCTGCCC GCACTCCTGG TCCTGCTCGG GGCTCTGTTC | 120 |
| CCAGGACCTG GCAATGCCCA GACATCTGTG TCCCCCTCAA AAGTCATCCT GCCCCGGGGA | 180 |
| GGCTCCGTGC TGGTGACATG CAGCACCTCC TGTGACCAGC CCAAGTTGTT GGGCATAGAG | 240 |
| ACCCCGTTGC CTAAAAAGGA GTTGCTCCTG CCTGGGAACA ACCGGAAGGT GTATGAACTG | 300 |
| AGCAATGTGC AAGAAGATAG CCAACCAATG TGCTATTCAA ACTGCCCTGA TGGGCAGTCA | 360 |
| ACAGCTAAAA CCTTCCTCAC CGTGTACTGG ACTCCAGAAC GGGTGGAACT GGCACCCCTC | 420 |
| CCCTCTTGGC AGCCAGTGGG CAAGAACCTT ACCCTACGCT GCCAGGTGGA GGGTGGGGCA | 480 |
| CCCCGGGCCA ACCTCACCGT GGTGCTGCTC CGTGGGGAGA AGGAGCTGAA ACGGGAGCCA | 540 |
| GCTGTGGGGG AGCCCGCTGA GGTCACGACC ACGGTGCTGG TGAGGAGAGA TCACCATGGA | 600 |
| GCCAATTTCT CGTGCCGCAC TGAACTGGAC CTGCGGCCCC AAGGGCTGGA GCTGTTTGAG | 660 |
| AACACCTCGG CCCCCTACCA GCTCCAGACC TTTGTCCTGC CAGCGACTCC CCCACAACTT | 720 |
| GTCAGCCCCC GGGTCCTAGA GGTGGACACG CAGGGGACCG TGGTCTGTTC CCTGGACGGG | 780 |
| CTGTTCCCAG TCTCGGAGGC CCAGGTCCAC CTGGCACTGG GGGACCAGAG GTTGAACCCC | 840 |
| ACAGTGACCT ATGGCAACGA CTCCTTCTCG GCCAAGGCCT CAGTCAGTGT GACCGCAGAG | 900 |
| GACGAGGGCA CCCAGCGGCT GACGTGTGCA GTAATACTGG GGAACCAGAG CCAGGAGACA | 960 |
| CTGCAGACAG TGACCATCTA CAGCTTTCCG GCGCCCAACG TGATTCTGAC GAAGCCAGAG | 1020 |
| GTCTCAGAAG GGACCGAGGT GACAGTGAAG TGTGAGGCCC ACCCTAGAGC CAAGGTGACG | 1080 |
| CTGAATGGGG TTCCAGCCCA GCCACTGGGC CCGAGGGCCC AGCTCCTGCT GAAGGCCACC | 1140 |
| CCAGAGGACA ACGGGCGCAG CTTCTCCTGC TCTGCAACCC TGGAGGTGGC CGGCCAGCTT | 1200 |
| ATACACAAGA ACCAGACCCG GGAGCTTCGT GTCCTGTATG GCCCCCGACT GGACGAGAGG | 1260 |
| GATTGTCCGG GAAACTGGAC GTGGCCAGAA AATTCCCAGC AGACTCCAAT GTGCCAGGCT | 1320 |
| TGGGGGAACC CATTGCCCGA GCTCAAGTGT CTAAAGGATG GCACTTTCCC ACTGCCCATC | 1380 |
| GGGGAATCAG TGACTGTCAC TCGAGATCTT GAGGGCACCT ACCTCTGTCG GGCCAGGAGC | 1440 |
| ACTCAAGGGG AGGTCACCCG CGAGGTGACC GTGAATGTGC TCTCCCCCCG GTATGAGATT | 1500 |
| GTCATCATCA CTGTGGTAGC AGCCGCAGTC ATAATGGGCA CTGCAGGCCT CAGCACGTAC | 1560 |
| CTCTATAACC GCCAGCGGAA GATCAAGAAA TACAGACTAC AACAGGCCCA AAAAGGGACC | 1620 |
| CCCATGAAAC CGAACACACA AGCCACGCCT CCCTGAACCT ATCCCGGGAC AGGGCCTCTT | 1680 |
| CCTCGGCCTT CCCATATTGG TGGCAGTGGT GCCACACTGA ACAGAGTGGA AGACATATGC | 1740 |
| CATGCAGCTA CACCTACCGG CCCTGGGACG CCGGAGGACA GGGCATTGTC CTCAGTCAGA | 1800 |
| TACAACAGCA TTTGGGGCCA TGGTACCTGC ACACCTAAAA CACTAGGCCA CGCATCTGAT | 1860 |
| CTGTAGTCAC ATGACTAAGC CAAGAGGAAG GAGCAAGACT CAAGACATGA TTGATGGATG | 1920 |
| TTAAAGTCTA GCCTGATGAG AGGGGAAGTG GTGGGGGAGA CATAGCCCCA CCATGAGGAC | 1980 |
| ATACAACTGG GAAATACTGA AACTTGCTGC CTATTGGGTA TGCTGAGGCC CACAGACTTA | 2040 |
| CAGAAGAAGT GGCCCTCCAT AGACATGTGT AGCATCAAAA CACAAAGGCC CACACTTCCT | 2100 |
| GACGGATGCC AGCTTGGGCA CTGCTGTCTA CTGACCCCAA CCCTTGATGA TATGTATTTA | 2160 |
| TTCATTTGTT ATTTTACCAG CTATTTATTG AGTGTCTTTT ATGTAGGCTA AATGAACATA | 2220 |
| GGTCTCTGGC CTCACGGAGC TCCCAGTCCA TGTCACATTC AAGGTCACCA GGTACAGTTG | 2280 |
| TACAGGTTGT ACACTGCAGG AGAGTGCCTG GCAAAAAGAT CAAATGGGGC TGGGACTTCT | 2340 |
| CATTGGCCAA CCTGCCTTTC CCCAGAAGGA GTGATTTTTC TATCGGCACA AAAGCACTAT | 2400 |
| ATGGACTGGT AATGGTTCAC AGGTTCAGAG ATTACCCAGT GAGGCCTTAT TCCTCCCTTC | 2460 |
| CCCCCAAAAC TGACACCTTT GTTAGCCACC TCCCCACCCA CATACATTTC TGCCAGTGTT | 2520 |
| CACAATGACA CTCAGCGGTC ATGTCTGGAC ATGAGTGCCC AGGGAATATG CCCAAGCTAT | 2580 |
| GCCTTGTCCT CTTGTCCTGT TTGCATTTCA CTGGGAGCTT GCACTATTGC AGCTCCAGTT | 2640 |
| TCCTGCAGTG ATCAGGGTCC TGCAAGCAGT GGGGAAGGGG GCCAAGGTAT TGGAGGACTC | 2700 |
| CCTCCCAGCT TTGGAAGGGT CATCCGCGTG TGTGTGTGTG TGTATGTGTA GACAAGCTCT | 2760 |
| CGCTCTGTCA CCCAGGCTGG AGTGCAGTGG TGCAATCATG GTTCACTGCA GTCTTGACCT | 2820 |
| TTTGGGCTCA AGTGATCCTC CCACCTCAGC CTCCTGAGTA GCTGGGACCA TAGGCTCACA | 2880 |
| ACACCACACC TGGCAAATTT GATTTTTTTT TTTTTTTTCA GAGACGGGGT CTCGCAACAT | 2940 |
| TGCCCAGACT TCCTTTGTGT TAGTTAATAA AGCTTTCTCA ACTGCC | |

ACK3 DNA sequence
Gene name: angiopoietin 1 receptor (TIE-2; TEK)
Unigene number: Hs.89640
Probeset Accession #: L06139
Nucleic Acid Accession #: NM_000459
Coding sequence: 149-3523 (predicted start/stop codons underlined)

| | |
|---|---|
| CTTCTGTGCT GTTCCTTCTT GCCTCTAACT TGTAAACAAG ACGTACTAGG ACGATGCTAA | 60 |
| TGGAAAGTCA CAAACCGCTG GGTTTTTGAA AGGATCCTTG GGACCTCATG CACATTTGTG | 120 |
| GAAACTGGAT GGAGAGATTT GGGGAAGCAT GGACTCTTTA GCCAGCTTAG TTCTCTGTGG | 180 |
| AGTCAGCTTG CTCCTTTCTG GAACTGTGGA AGGTGCCATG GACTTGATCT TGATCAATTC | 240 |
| CCTACCTCTT GTATCTGATG CTGAAACATC TCTCACCTGC ATTGCCTCTG GGTGGCGCCC | 300 |
| CCATGAGCCC ATCACCATAG GAAGGGACTT TGAAGCCTTA ATGAACCAGC ACCAGGATCC | 360 |
| GCTGGAAGTT ACTCAAGATG TGACCAGAGA ATGGGCTAAA AAAGTTGTTT GGAAGAGAGA | 420 |
| AAAGGCTAGT AAGATCAATG GTGCTTATTT CTGTGAAGGG CGAGTTCGAG GAGAGGCAAT | 480 |
| CAGGATACGA ACCATGAAGA TGCGTCAACA AGCTTCCTTC CTACCAGCTA CTTTAACTAT | 540 |
| GACTGTGGAC AAGGGAGATA ACGTGAACAT ATCTTTCAAA AAGGTATTGA TTAAAGAAGA | 600 |
| AGATGCAGTG ATTTACAAAA ATGGTTCCTT CATCCATTCA GTGCCCCGGC ATGAAGTACC | 660 |
| TGATATTCTA GAAGTACACC TGCCTCATGC TCAGCCCCAG GATGCTGGAG TGTACTCGGC | 720 |
| CAGGTATATA GGAGGAAACC TCTTCACCTC GGCCTTCACC AGGCTGATAG TCCGGAGATG | 780 |
| TGAAGCCCAG AAGTGGGGAC CTGAATGCAA CCATCTCTGT ACTGCTTGTA TGAACAATGG | 840 |
| TGTCTGCCAT GAAGATACTG GAGAATGCAT TTGCCCTCCT GGGTTTATGG GAAGGACGTG | 900 |
| TGAGAAGGCT TGTGAACTGC ACACGTTTGG CAGAACTTGT AAAGAAAGGT GCAGTGGACA | 960 |
| AGAGGGATGC AAGTCTTATG TGTTCTGTCT CCCTGACCCC TATGGGTGTT CCTGTGCCAC | 1020 |
| AGGCTGGAAG GGTCTGCAGT GCAATGAAGC ATGCCACCCT GGTTTTTACG GGCCAGATTG | 1080 |
| TAAGCTTAGG TGCAGCTGCA ACAATGGGGA GATGTGTGAT CGCTTCCAAG GATGTCTCTG | 1140 |
| CTCTCCAGGA TGGCAGGGGC TCCAGTGTGA GAGAGAAGGC ATACCGAGGA TGACCCCAAA | 1200 |
| GATAGTGGAT TTGCCAGATC ATATAGAAGT AAACAGTGGT AAATTTAATC CCATTTGCAA | 1260 |
| AGCTTCTGGC TGGCCGCTAC CTACTAATGA AGAAATGACC CTGGTGAAGC CGGATGGGAC | 1320 |
| AGTGCTCCAT CCAAAAGACT TTAACCATAC GGATCATTTC TCAGTAGCCA TATTCACCAT | 1380 |
| CCACCGGATC CTCCCCCCTG ACTCAGGAGT TTGGGTCTGC AGTGTGAACA CAGTGGCTGG | 1440 |
| GATGGTGGAA AAGCCCTTCA ACATTTCTGT TAAAGTTCTT CCAAAGCCCC TGAATGCCCC | 1500 |
| AAACGTGATT GACACTGGAC ATAACTTTGC TGTCATCAAC ATCAGCTCTG AGCCTTACTT | 1560 |
| TGGGGATGGA CCAATCAAAT CCAAGAAGCT TCTATACAAA CCCGTTAATC ACTATGAGGC | 1620 |
| TTGGCAACAT ATTCAAGTGA CAAATGAGAT TGTTACACTC AACTATTTGG AACCTCGGAC | 1680 |
| AGAATATGAA CTCTGTGTGC AACTGGTCCG TCGTGGAGAG GGTGGGGAAG GGCATCCTGG | 1740 |
| ACCTGTGAGA CGCTTCACAA CAGCTTCTAT CGGACTCCCT CCTCCAAGAG GTCTAAATCT | 1800 |
| CCTGCCTAAA AGTCAGACCA CTCTAAATTT GACCTGGCAA CCAATATTTC CAAGCTCGGA | 1860 |
| AGATGACTTT TATGTTGAAG TGGAGAGAAG GTCTGTGCAA AAAAGTGATC AGCAGAATAT | 1920 |
| TAAAGTTCCA GGCAACTTGA CTTCGGTGCT ACTTAACAAC TTACATCCCA GGGAGCAGTA | 1980 |
| CGTGGTCCGA GCTAGAGTCA ACACCAAGGC CCAGGGGGAA TGGAGTGAAG ATCTCACTGC | 2040 |
| TTGGACCCTT AGTGACATTC TTCCTCCTCA ACCAGAAAAC ATCAAGATTT CCAACATTAC | 2100 |
| ACACTCCTCG GCTGTGATTT CTTGGACAAT ATTGGATGGC TATTCTATTT CTTCTATTAC | 2160 |
| TATCCGTTAC AAGGTTCAAG GCAAGAATGA AGACCAGCAC GTTGATGTGA AGATAAAGAA | 2220 |
| TGCCACCATC ATTCAGTATC AGCTCAAGGG CCTAGAGCCT GAAACAGCAT ACCAGGTGGA | 2280 |
| CATTTTTGCA GAGAACAACA TAGGGTCAAG CAACCCAGCC TTTTCTCATG AACTGGTGAC | 2340 |
| CCTCCCAGAA TCTCAAGCAC CAGCGGACCT CGGAGGGGGG AAGATGCTGC TTATAGCCAT | 2400 |
| CCTTGGCTCT GCTGGAATGA CCTGCCTGAC TGTGCTGTTG GCCTTTCTGA TCATATTGCA | 2460 |
| ATTGAAGAGG GCAAATGTGC AAAGGAGAAT GGCCCAAGCC TTCCAAAACG TGAGGGAAGA | 2520 |
| ACCAGCTGTG CAGTTCAACT CAGGGACTCT GGCCCTAAAC AGGAAGGTCA AAAACAACCC | 2580 |
| AGATCCTACA ATTTATCCAG TGCTTGACTG GAATGACATC AAATTTCAAG ATGTGATTGG | 2640 |
| GGAGGGCAAT TTTGGCCAAG TTCTTAAGGC GCGCATCAAG AAGGATGGGT TACGGATGGA | 2700 |
| TGCTGCCATC AAAAGAATGA AAGAATATGC CTCCAAAGAT GATCACAGGG ACTTTGCAGG | 2760 |
| AGAACTGGAA GTTCTTTGTA AACTTGGACA CCATCCAAAC ATCATCAATC TCTTAGGAGC | 2820 |
| ATGTGAACAT CGAGGCTACT TGTACCTGGC CATTGAGTAC GCGCCCCATG GAAACCTTCT | 2880 |
| GGACTTCCTT CGCAAGAGCC GTGTGCTGGA GACGGACCCA GCATTTGCCA TTGCCAATAG | 2940 |
| CACCGCGTCC ACACTGTCCT CCCAGCAGCT CCTTCACTTC GCTGCCGACG TGGCCCGGGG | 3000 |
| CATGGACTAC TTGAGCCAAA AACAGTTTAT CCACAGGGAT CTGGCTGCCA GAAACATTTT | 3060 |
| AGTTGGTGAA AACTATGTGG CAAAAATAGC AGATTTTGGA TTGTCCCGAG GTCAAGAGGT | 3120 |
| GTACGTGAAA AAGACAATGG GAAGGCTCCC AGTGCGCTGG ATGGCCATCG AGTCACTGAA | 3180 |
| TTACAGTGTG TACACAACCA ACAGTGATGT ATGGTCCTAT GGTGTGTTAC TATGGGAGAT | 3240 |
| TGTTAGCTTA GGAGGCACAC CCTACTGCGG GATGACTTGT GCAGAACTCT ACGAGAAGCT | 3300 |
| GCCCCAGGGC TACAGACTGG AGAAGCCCCT GAACTGTGAT GATGAGGTGT ATGATCTAAT | 3360 |
| GAGACAATGC TGGCGGGAGA AGCCTTATGA GAGGCCATCA TTTGCCCAGA TATTGGTGTC | 3420 |
| CTTAAACAGA ATGTTAGAGG AGCGAAAGAC CTACGTGAAT ACCACGCTTT ATGAGAAGTT | 3480 |
| TACTTATGCA GGAATTGACT GTTCTGCTGA AGAAGCGGCC TAGGACAGAA CATCTGTATA | 3540 |
| CCCTCTGTTT CCCTTTCACT GGCATGGGAG ACCCTTGACA ACTGCTGAGA AAACATGCCT | 3600 |
| CTGCCAAAGG ATGTGATATA TAAGTGTACA TATGTGCTGG AATTCTAACA AGTCATAGGT | 3660 |
| TAATATTTAA GACACTGAAA AATCTAAGTG ATATAAATCA GATTCTTCTC TCTCATTTTA | 3720 |
| TCCCTCACCT GTAGCATGCC AGTCCCGTTT CATTTAGTCA TGTGACCACT CTGTCTTGTG | 3780 |
| TTTCCACAGC CTGCAAGTTC AGTCCAGGAT GCTAACATCT AAAAATAGAC TTAAATCTCA | 3840 |
| TTGCTTACAA GCCTAAGAAT CTTTAGAGAA GTATACATAA GTTTAGGATA AAATAATGGG | 3900 |
| ATTTTCTTTT CTTTTCTCTG GTAATATTGA CTTGTATATT TTAAGAAATA ACAGAAAGCC | 3960 |
| TGGGTGACAT TTGGGAGACA TGTGACATTT ATATATTGAA TTAATATCCC TACATGTATT | 4020 |
| GCACATTGTA AAAAGTTTTA GTTTTGATGA GTTGTGAGTT TACCTTGTAT ACTGTAGGCA | 4080 |
| CACTTTGCAC TGATATATCA TGAGTGAATA AATGTCTTGC CTACTCAAAA AAAAAAAA | |

PZA6 DNA sequence
Gene name: prostate differentiation factor (PLAB; MIC-1)
Unigene number: Hs.116577
Probeset Accession #: AB000584
Nucleic Acid Accession #: NM_004864
Coding sequence: 26-952 (predicted start/stop codons underlined)

| | |
|---|---|
| CGGAACGAGG GCAACCTGCA CAGCCATGCC CGGGCAAGAA CTCAGGACGG TGAATGGCTC | 60 |
| TCAGATGCTC CTGGTGTTGC TGGTGCTCTC GTGGCTGCCG CATGGGGGCG CCCTGTCTCT | 120 |
| GGCCGAGGCG AGCCGCGCAA GTTTCCCGGG ACCCTCAGAG TTGCACTCCG AAGACTCCAG | 180 |
| ATTCCGAGAG TTGCGGAAAC GCTACGAGGA CCTGCTAACC AGGCTGCGGG CCAACCAGAG | 240 |
| CTGGGAAGAT TCGAACACCG ACCTCGTCCC GGCCCCTGCA GTCCGGATAC TCACGCCAGA | 300 |
| AGTGCGGCTG GGATCCGGCG GCCACCTGCA CCTGCGTATC TCTCGGGCCG CCCTTCCCGA | 360 |
| GGGGCTCCCC GAGGCCTCCC GCCTTCACCG GGCTCTGTTC CGGCTGTCCC CGACGGCGTC | 420 |
| AAGGTCGTGG GACGTGACAC GACCGCTGCG GCGTCAGCTC AGCCTTGCAA GACCCCAAGC | 480 |
| GCCCGCGCTG CACCTGCGAC TGTCGCCGCC GCCGTCGCAG TCGGACCAAC TGCTGGCAGA | 540 |
| ATCTTCGTCC GCACGGCCCC AGCTGGAGTT GCACTTGCGG CCGCAAGCCG CCAGGGGGCG | 600 |
| CCGCAGAGCG CGTGCGCGCA ACGGGGACGA CTGTCCGCTC GGGCCCGGGC GTTGCTGCCG | 660 |
| TCTGCACACG GTCCGCGCGT CGCTGGAAGA CCTGGGCTGG GCCGATTGGG TGCTGTCGCC | 720 |
| ACGGGAGGTG CAAGTGACCA TGTGCATCGG CGCGTGCCCG AGCCAGTTCC GGGCGGCAAA | 780 |
| CATGCACGCG CAGATCAAGA CGAGCCTGCA CCGCCTGAAG CCCGACACGG AGCCAGCGCC | 840 |
| CTGCTGCGTG CCCGCCAGCT ACAATCCCAT GGTGCTCATT CAAAAGACCG ACACCGGGGT | 900 |
| GTCGCTCCAG ACCTATGATG ACTTGTTAGC CAAAGACTGC CACTGCATAT GAGCAGTCCT | 960 |
| GGTCCTTCCA CTGTGCACCT GCGCGGGGGA GGCGACCTCA GTTGTCCTGC CCTGTGGAAT | 1020 |
| GGGCTGAAGG TTCCTGAGAC ACCCGATTCC TGCCCAAACA GCTGTATTTA TATAAGTCTG | 1080 |
| TTATTTATTA TTAATTTATT GGGGTGACCT TCTTGGGGAC TCGGGGGCTG GTCTGATGGA | 1140 |
| ACTGTGTATT TATTTAAAAC TCTGGTGATA AAAATAAAGC TGTCTGAACT GTTAAAAAAA | 1200 |

AAC8 DNA sequence
Gene name: none
Unigene number: Hs.6682
Probeset Accession #: AA227926
Nucleic Acid Accession #: none
Coding sequence: no ORF identified, possible frameshifts

| | |
|---|---|
| AAGCTGCAGT TAGCCAAGAT CGCATCATTG CACTCCAGCC TAGGGGACAA GAGCGCGAGA | 60 |
| CTTCATCTCA AAGATTTTTA AATAATAGCT AAAGGTATGC TCTCTAGGTC ATCCTTAGTT | 120 |
| TATTAGTACT GTACTTAAAA ATTATTTTTT TAATAGTCAA TTTTGGGAGA TAATTATTTC | 180 |
| TTTCCTTATA TTTTCCAATT AGTTGGTGTC TAAAAATAAA TGTTTTGTCT AATTTTAGAT | 240 |
| CAGGTATACA TTCACAAAAG CATAAATCAT AGTCTCACAG GAAATTCACC AATTTTCCAT | 300 |
| ATGTCGTGAG ATAACTGTCC TTTCTACAAC CTCATAACAA TGAATTTATA TAATTACCTA | 360 |
| GATTTTCTTA GTGTGAATCT ACCCATTAGT TTTATTTTCT TGGTAGTTAT TTTTTTCCCT | 420 |
| CCTCTCTGTT ACTATTGGGC TTAAAATACA CAGGAGGACG GTTACAGTGT CCTAATAGCT | 480 |
| GTTACATGTG TGTGTTTCAG CGTACTTGAA TCAAGTGTAC ATTTATAGTA CCAATAACCG | 540 |
| CCTTTACAGC TTTACAGTTA ACAATTCTCT CACAAAACTG TAGAGCATTA GGCATCTGAG | 600 |
| AGCCATAGAG GGCCAACTTT GTTCCAGAGT GAACATGCTT TTTTTCCTCA ACATATACAC | 660 |
| TACTGATTTT TTTTAAAAGT ATGACTTTCA AGTGAATTAA TGTATTGGTT AGGAGAACTG | 720 |
| CTTGCTAAGT CCTTATTACC TCTTGTTAAA GCCTCAGAAG GCCGTGCTGA AAGCCAGAGG | 780 |
| GGAAAAAAAG AGTAATGCAC AGGTATCTCT TTTGCAGTGG TGACTGTATT TTGAGTACCT | 840 |
| TGTGTGACAG GGTATTATTA CAGCATCTTG TGGGAAAACC TATTAGGCCT TTGCATGTTA | 900 |
| AAGCTGTATA ATTTGTTGGG TTGTGAGTGG TCTGACTTAA ATGTGTATTA TAAAATTTAG | 960 |
| ACATCAAATT TTCCTACTAA CTAACTTTAT TAGATGCATA CTTGGAAGCA CAGTCATATC | 1020 |
| ACACTGGGAG GCAATGCAAT GTGGTTACCT GGTCCTAGGT TTGAACTGTC TTATTTCAAA | 1080 |
| AGATTTCTGA ATTAATTTTT CCCTAGAATT TCTCCTTCAT TCCAAAGTAC AAACATACTT | 1140 |
| TGAAGAATGA AACAGATTGT TCCCATGAAT GTATGCTCAT ACTCGACTAG AAACGATCTA | 1200 |
| TGTTAAATGA CTGTGTATAT GAATTATTTC AAGTACTACC CCAAATAACT TTCTTATTGC | 1260 |
| TCTGAAAGAA GAAAAGCAAT GTAAATCACT ATGATTATTG CACAAACAAC CAGAATTCTC | 1320 |
| CAACAATTTT AAGTAATCTG ATCCTCTTCT TGGAGAAAAT TGTTACCTAA TAGTTTTTCC | 1380 |
| TTATGAATGT TATTACTACT GGTATAAATC AAATTTCTAT AAATTTCCTA CTTAAAGTCT | 1440 |
| TAARAACTGG GTTCTTCCTT TGATGTTATT CATGTTCAGA AAGGGAAACA ACACTTTACT | 1500 |
| TTTTTAGGGA CAATTTCTAG AATCTATAGT AGTATCAGGA TATATTTTGC TTTAAAATAT | 1560 |
| ATTTTGGTTA TTTTGAATAC AGACATTGGC TCCAAATTTT CATCTTTGCA CAATAGTATG | 1620 |
| ACTTTTCACT AGAACTTCTC AACATTTGGG AACTTTGCAA ATATGAGCAT CATATGTGTT | 1680 |
| AAGGCTGTAT CATTTAATGC TATGAGATAC ATTGTTTTCT CCCTATGCCA AACAGGTGAA | 1740 |
| CAAACGTAGT TGTTTTTTAC TGATACTAAA TGTTGGCTAC CTGTGATTTT ATAGTATGCA | 1800 |
| CATGTCAGAA AAAGGCAAGA CAAATGGCCT CTTGTACTGA ATACTTCGGC AAACTTATTG | 1860 |
| GGGTCTTCAT TTTCTGACAG ACAGGATTTG ACTCAATATT TGTAGAGCTT GCGTAGGAAT | 1920 |
| GGGATTACAT GGGTAGTGAT GCACTGGTAG GAAATGGTTT TTAGTTATTG ACTCAGGAAT | 1980 |
| TCATCTGAGG ATGAATCTTT TATGTCTTTT TATTGTAAGG CATATCTGGA ATTTACTTTA | 2040 |
| TAAAGGAGGG GTTTAGGAAA GCTTTGTCCT AAAAATTGGG CCCCGGGGAT GGGAACTTCA | 2100 |
| TTTTCAGTTG CCAAGGGGTA GAAAAATAAT ATGTGTGTTG TTATGTTTAT GTTAACATAT | 2160 |
| TATTAGGTAC TATCTATGAA TGTATTTAAA TATTTTTCAT ATTCTGTGAC AAGCATTTAT | 2220 |
| AATTTGCAAC AAGTGGAGTC CATTTAGCCC AGTGGGAAAG TCTTGGAACT CAGGTTACCC | 2280 |
| TTGAAGGATA TGCTGGCAGC CATCTCTTTG ATCTGTGCTT AAACTGTAAT TTATAGACCA | 2340 |
| GCTAAATCCC TAACTTGGAT CTGGAATGCA TTAGTTATGA CCTTGTACCA TTCCCAGAAT | 2400 |
| TTCAGGGGCA TCGTGGGTTT GGTCTAGTGA TTGAAAACAC AAGAACAGAG AGATCCAGCT | 2460 |
| GAAAAAGAGT GATCCTCAAT ATCCTAACTA ACTGGTCCTC AACTCAAGCA GAGTTTCTTC | 2520 |
| ACTCTGGCAC TGTGATCATG AAACTTAGTA GAGGGGATTG TGTGTATTTT ATACAAATTT | 2580 |
| AATACAATGT CTTACATTGA TAAAATTCTT AAAGAGCAAA ACTGCATTTT ATTTCTGCAT | 2640 |
| CCACATTCCA ATCATATTAG AACTAAGATA TTTATCTATG AAGATATAAA TGGTGCAGAG | 2700 |
| AGACTTTCAT CTGTGGATTG CGTTGTTTCT CTAGGGTTCC TCAGCCACTG ATGCCTCGCC | 2760 |
| ACAAGCCATG TGATATGTGA AATAAAAAGG GATTCTTCCT ATAGCCTAAA TGAAGTTCCC | 2820 |
| TCTGGGGAGA GTTCTGGTAC TGCAATCACA ATGCCAGATG GTGTTTATGG GCTATTTGTG | 2880 |
| TAAGTAAGTG GTAAGATGCT ATGAAGTAAG TGTGTTTGTT TTCATCTTAT GGAAACTCTT | 2940 |
| GATGCATGTG CTTTTGTATG GAATAAATTT TGGTGCAATA TGATGTCATT CAACTTTGCA | 3000 |
| TTGAATTGAA TTTTGGTTGT ATTTATATGT ATTATACCTG TCACGCTTCT AGTTGCTTCA | 3060 |
| ACCATTTTAT AACCATTTTT GTACATATTT TACTTGAAAA TATTTTAAAT GGAAATTTAA | 3120 |
| ATAAACATTT GATAGTTTAC ATAAAAAAAA AAAAAAAAAA A | |

AAD2 DNA sequence
Gene name: Thrombospondin-1
Unigene number: Hs.87409
Probeset Accession #: AA232645
Nucleic Acid Accession #: NM_003246
Coding sequence: 112-3624 (predicted start/stop codons underlined)

| | |
|---|---|
| GGACGCACAG GCATTCCCCG CGCCCCTCCA GCCCTCGCCG CCCTCGCCAC CGCTCCCGGC | 60 |
| CGCCGCGCTC CGGTACACAC AGGATCCCTG CTGGGCACCA ACAGCTCCAC CATGGGGCTG | 120 |
| GCCTGGGGAC TAGGCGTCCT GTTCCTGATG CATGTGTGTG GCACCAACCG CATTCCAGAG | 180 |
| TCTGGCGGAG ACAACAGCGT GTTTGACATC TTTGAACTCA CCGGGGCCGC CCGCAAGGGG | 240 |
| TCTGGGCGCC GACTGGTGAA GGGCCCCGAC CCTTCCAGCC CAGCTTTCCG CATCGAGGAT | 300 |
| GCCAACCTGA TCCCCCCTGT GCCTGATGAC AAGTTCCAAG ACCTGGTGGA TGCTGTGCGG | 360 |
| GCAGAAAAGG GTTTCCTCCT TCTGGCATCC CTGAGGCAGA TGAAGAAGAC CCGGGGCACG | 420 |
| CTGCTGGCCC TGGAGCGGAA AGACCACTCT GGCCAGGTCT TCAGCGTGGT GTCCAATGGC | 480 |
| AAGGCGGGCA CCCTGGACCT CAGCCTGACC GTCCAAGGAA AGCAGCACGT GGTGTCTGTG | 540 |
| GAAGAAGCTC TCCTGGCAAC CGGCCAGTGG AAGAGCATCA CCCTGTTTGT GCAGGAAGAC | 600 |
| AGGGCCCAGC TGTACATCGA CTGTGAAAAG ATGGAGAATG CTGAGTTGGA CGTCCCCATC | 660 |
| CAAAGCGTCT TCACCAGAGA CCTGGCCAGC ATCGCCAGAC TCCGCATCGC AAAGGGGGGC | 720 |
| GTCAATGACA ATTTCCAGGG GGTGCTGCAG AATGTGAGGT TTGTCTTTGG AACCACACCA | 780 |
| GAAGACATCC TCAGGAACAA AGGCTGCTCC AGCTCTACCA GTGTCCTCCT CACCCTTGAC | 840 |
| AACAACGTGG TGAATGGTTC CAGCCCTGCC ATCCGCACTA ACTACATTGG CCACAAGACA | 900 |
| AAGGACTTGC AAGCCATCTG CGGCATCTCC TGTGATGAGC TGTCCAGCAT GGTCCTGGAA | 960 |
| CTCAGGGGCC TGCGCACCAT TGTGACCACG CTGCAGGACA GCATCCGCAA AGTGACTGAA | 1020 |
| GAGAACAAAG AGTTGGCCAA TGAGCTGAGG CGGCCTCCCC TATGCTATCA CAACGGAGTT | 1080 |
| CAGTACAGAA ATAACGAGGA ATGGACTGTT GATAGCTGCA CTGAGTGTCA CTGTCAGAAC | 1140 |
| TCAGTTACCA TCTGCAAAAA GGTGTCCTGC CCCATCATGC CCTGCTCCAA TGCCACAGTT | 1200 |
| CCTGATGGAG AATGCTGTCC TCGCTGTTGG CCCAGCGACT CTGCGGACGA TGGCTGGTCT | 1260 |
| CCATGGTCCG AGTGGACCTC CTGTTCTACG AGCTGTGGCA ATGGAATTCA GCAGCGCGGC | 1320 |
| CGCTCCTGCG ATAGCCTCAA CAACCGATGT GAGGGCTCCT CGGTCCAGAC ACGGACCTGC | 1380 |
| CACATTCAGG AGTGTGACAA AAGATTTAAA CAGGATGGTG GCTGGAGCCA CTGGTCCCCG | 1440 |
| TGGTCATCTT GTTCTGTGAC ATGTGGTGAT GGTGTGATCA CAAGGATCCG GCTCTGCAAC | 1500 |
| TCTCCCAGCC CCCAGATGAA TGGGAAACCC TGTGAAGGCG AAGCGCGGGA GACCAAAGCC | 1560 |
| TGCAAGAAAG ACGCCTGCCC CATCAATGGA GGCTGGGGTC CTTGGTCACC ATGGGACATC | 1620 |
| TGTTCTGTCA CCTGTGGAGG AGGGGTACAG AAACGTAGTC GTCTCTGCAA CAACCCCGCA | 1680 |
| CCCCAGTTTG GAGGCAAGGA CTGCGTTGGT GATGTAACAG AAAACCAGAT CTGCAACAAG | 1740 |
| CAGGACTGTC CAATTGATGG ATGCCTGTCC AATCCCTGCT TTGCCGGCGT GAAGTGTACT | 1800 |
| AGCTACCCTG ATGGCAGCTG GAAATGTGGT GCTTGTCCCC CTGGTTACAG TGGAAATGGC | 1860 |
| ATCCAGTGCA CAGATGTTGA TGAGTGCAAA GAAGTGCCTG ATGCCTGCTT CAACCACAAT | 1920 |
| GGAGAGCACC GGTGTGAGAA CACGGACCCC GGCTACAACT GCCTGCCCTG CCCCCCACGC | 1980 |
| TTCACCGGCT CACAGCCCTT CGGCCAGGGT GTCGAACATG CCACGGCCAA CAAACAGGTG | 2040 |
| TGCAAGCCCC GTAACCCCTG CACGGATGGG ACCCACGACT GCAACAAGAA CGCCAAGTGC | 2100 |
| AACTACCTGG GCCACTATAG CGACCCCATG TACCGCTGCG AGTGCAAGCC TGGCTACGCT | 2160 |
| GGCAATGGCA TCATCTGCGG GGAGGACACA GACCTGGATG GCTGGCCCAA TGAGAACCTG | 2220 |
| GTGTGCGTGG CCAATGCGAC TTACCACTGC AAAAAGGATA ATTGCCCCAA CCTTCCCAAC | 2280 |
| TCAGGGCAGG AAGACTATGA CAAGGATGGA ATTGGTGATG CCTGTGATGA TGACGATGAC | 2340 |
| AATGATAAAA TTCCAGATGA CAGGGACAAC TGTCCATTCC ATTACAACCC AGCTCAGTAT | 2400 |
| GACTATGACA GAGATGATGT GGGAGACCGC TGTGACAACT GTCCCTACAA CCACAACCCA | 2460 |
| GATCAGGCAG ACACAGACAA CAATGGGCAA GGAGACGCCT GTGCTGCAGA CATTGATGGA | 2520 |
| GACGGTATCC TCAATGAACG GGACAACTGC CAGTACGTCT ACAATGTGGA CCAGAGAGAC | 2580 |
| ACTGATATGG ATGGGGTTGG AGATCAGTGT GACAATTGCC CCTTGGAACA CAATCCGGAT | 2640 |
| CAGCTGGACT CTGACTCAGA CCGCATTGGA GATACCTGTG ACAACAATCA GGATATTGAT | 2700 |
| GAAGATGGCC ACCAGAACAA TCTGGACAAC TGTCCCTATG TGCCCAATGC CAACCAGGCT | 2760 |
| GACCATGACA AAGATGGCAA GGGAGATGCC TGTGACCACG ATGATGACAA CGATGGCATT | 2820 |
| CCTGATGACA AGGACAACTG CAGACTCGTG CCCAATCCCG ACCAGAAGGA CTCTGACGGC | 2880 |
| GATGGTCGAG GTGATGCCTG CAAAGATGAT TTTGACCATG ACAGTGTGCC AGACATCGAT | 2940 |
| GACATCTGTC CTGAGAATGT TGACATCAGT GAGACCGATT TCCGCCGATT CCAGATGATT | 3000 |
| CCTCTGGACC CCAAAGGGAC ATCCCAAAAT GACCCTAACT GGGTTGTACG CCATCAGGGT | 3060 |
| AAAGAACTCG TCCAGACTGT CAACTGTGAT CCTGGACTCG CTGTAGGTTA TGATGAGTTT | 3120 |
| AATGCTGTGG ACTTCAGTGG CACCTTCTTC ATCAACACCG AAAGGGACGA TGACTATGCT | 3180 |
| GGATTTGTCT TTGGCTACCA GTCCAGCAGC CGCTTTTATG TTGTGATGTG GAAGCAAGTC | 3240 |
| ACCCAGTCCT ACTGGGACAC CAACCCCACG AGGGCTCAGG GATACTCGGG CCTTTCTGTG | 3300 |
| AAAGTTGTAA ACTCCACCAC AGGGCCTGGC GAGCACCTGC GGAACGCCCT GTGGCACACA | 3360 |
| GGAAACACCC CTGGCCAGGT GCGCACCCTG TGGCATGACC CTCGTCACAT AGGCTGGAAA | 3420 |
| GATTTCACCG CCTACAGATG GCGTCTCAGC CACAGGCCAA AGACGGGTTT CATTAGAGTG | 3480 |
| GTGATGTATG AAGGGAAGAA AATCATGGCT GACTCAGGAC CCATCTATGA TAAAACCTAT | 3540 |
| GCTGGTGGTA GACTAGGGTT GTTTGTCTTC TCTCAAGAAA TGGTGTTCTT CTCTGACCTG | 3600 |
| AAATACGAAT GTAGAGATCC CTAATCATCA AATTGTTGAT TGAAAGACTG ATCATAAACC | 3660 |
| AATGCTGGTA TTGCACCTTC TGGAACTATG GGCTTGAGAA AACCCCCAGG ATCACTTCTC | 3720 |
| CTTGGCTTCC TTCTTTTCTG TGCTTGCATC AGTGTGGACT CCTAGAACGT GCGACCTGCC | 3780 |
| TCAAGAAAAT GCAGTTTTCA AAAACAGACT CATCAGCATT CAGCCTCCAA TGAATAAGAC | 3840 |
| ATCTTCCAAG CATATAAACA ATTGCTTTGG TTTCCTTTTG AAAAAGCATC TACTTGCTTC | 3900 |
| AGTTGGGAAG GTGCCCATTC CACTCTGCCT TTGTCACAGA GCAGGGTGCT ATTGTGAGGC | 3960 |
| CATCTCTGAG CAGTGGACTC AAAAGCATTT TCAGGCATGT CAGAGAAGGG AGGACTCACT | 4020 |
| AGAATTAGCA AACAAAACCA CCCTGACATC CTCCTTCAGG AACACGGGGA GCAGAGGCCA | 4080 |
| AAGCACTAAG GGGAGGGCGC ATACCCGAGA CGATTGTATG AAGAAAATAT GGAGGAACTG | 4140 |
| TTACATGTTC GGTACTAAGT CATTTTCAGG GGATTGAAAG ACTATTGCTG GATTTCATGA | 4200 |
| TGCTGACTGG CGTTAGCTGA TTAACCCATG TAAATAGGCA CTTAAATAGA AGCAGGAAAG | 4260 |
| GGAGACAAAG ACTGGCTTCT GGACTTCCTC CCTGATCCCC ACCCTTACTC ATCACCTTGC | 4320 |
| AGTGGCCAGA ATTAGGGAAT CAGAATCAAA CCAGTGTAAG GCAGTGCTGG CTGCCATTGC | 4380 |
| CTGGTCACAT TGAAATTGGT GGCTTCATTC TAGATGTAGC TTGTGCAGAT GTAGCAGGAA | 4440 |
| AATAGGAAAA CCTACCATCT CAGTGAGCAC CAGCTGCCTC CCAAAGGAGG GGCAGCCGTG | 4500 |
| CTTATATTTT TATGGTTACA ATGGCACAAA ATTATTATCA ACCTAACTAA AACATTCCTT | 4560 |
| TTCTCTTTTT TCCGTAATTA CTAGGTAGTT TTCTAATTCT CTCTTTTGGA AGTATGATTT | 4620 |
| TTTTAAAGTC TTTACGATGT AAAATATTTA TTTTTTACTT ATTCTGGAAG ATCTGGCTGA | 4680 |
| AGGATTATTC ATGGAACAGG AAGAAGCGTA AAGACTATCC ATGTCATCTT TGTTGAGAGT | 4740 |
| CTTCGTGACT GTAAGATTGT AAATACAGAT TATTTATTAA CTCTGTTCTG CCTGGAAATT | 4800 |
| TAGGCTTCAT ACGGAAAGTG TTTGAGAGCA AGTAGTTGAC ATTTATCAGC AAATCTCTTG | 4860 |
| CAAGAACAGC ACAAGGAAAA TCAGTCTAAT AAGCTGCTCT GCCCCTTGTG CTCAGAGTGG | 4920 |
| ATGTTATGGG ATTCCTTTTT TCTCTGTTTT ATCTTTTCAA GTGGAATTAG TTGGTTATCC | 4980 |
| ATTTGCAAAT GTTTTAAATT GCAAAGAAAG CCATGAGGTC TTCAATACTG TTTTACCCCA | 5040 |
| TCCCTTGTGC ATATTTCCAG GGAGAAGGAA AGGATATACA CTTTTTTCTT TCATTTTTCC | 5100 |
| AAAAGAGAAA AAAATGACAA AAGGTGAAAC TTACATACAA ATATTACCTC ATTTGTTGTG | 5160 |
| TGACTGAGTA AAGAATTTTT GGATCAAGCG GAAAGAGTTT AAGTGTCTAA CAAACTTAAA | 5220 |
| GCTACTGTAG TACCTAAAAA GTCAGTGTTG TACATAGCAT AAAAACTCTG CAGAGAAGTA | 5280 |
| TTCCCAATAA GGAAATAGCA TTGAAATGTT AAATACAATT TCTGAAAGTT ATGTTTTTTT | 5340 |
| TCTATCATCT GGTATACCAT TGCTTTATTT TTATAAATTA TTTTCTCATT GCCATTGGAA | 5400 |
| TAGAATATTC AGATTGTGTA GATATGCTAT TTAAATAATT TATCAGGAAA TACTGCCTGT | 5460 |
| AGAGTTAGTA TTTCTATTTT TATATAATGT TTGCACACTG AATTGAAGAA TTGTTGGTTT | 5520 |
| TTTCTTTTTT TTGTTTTTTT TTTTTTTTTT TTTTTTTTTG CTTTTGACCT CCCATTTTTA | 5580 |
| CTATTTGCCA ATACCTTTTT CTAGGAATGT GCTTTTTTTT GTACACATTT TTATCCATTT | 5640 |
| TACATTCTAA AGCAGTGTAA GTTGTATATT ACTGTTTCTT ATGTACAAGG AACAACAATA | 5700 |
| AATCATATGG AAATTTATAT TT | |

AAD9 DNA sequence
Gene name: LIM homeobox protein cofactor (CLIM-1)
Unigene number: Hs.4980
Probeset Accession #: F13782
Nucleic Acid Accession #: AF047337
Coding sequence: 110-1231 (predicted start/stop codons underlined)

| | |
|---|---|
| GTGAGCGTGT GTGCGTGCGT CTACTTTGTA CTGGGAAGAA CACAGCCCAT GTGCTCTGCA | 60 |
| TGGACGTTAC TGATACTCTG TTTAGCTTGA TTTTCGAAAA GCAGGCAAGA TGTCCAGCAC | 120 |
| ACCACATGAC CCCTTCTATT CTTCTCCTTT CGGCCCATTT TATAGGAGGC ATACACCATA | 180 |
| CATGGTACAG CCAGAGTACC GAATCTATGA GATGAACAAG AGACTGCAGT CTCGCACAGA | 240 |
| GGATAGTGAC AACCTCTGGT GGGACGCCTT TGCCACTGAA TTTTTTGAAG ATGACGCCAC | 300 |
| ATTAACCCTT TCATTTTGTT TGGAAGATGG ACCAAAGCGA TACACTATCG GCAGGACCCT | 360 |
| CATCCCCCGT TACTTTAGCA CTGTGTTTGA AGGAGGGGTG ACCGACCTGT ATTACATTCT | 420 |
| CAAACACTCG AAAGAGTCAT ACCACAACTC ATCCATCACG GTGGACTGCG ACCAGTGTAC | 480 |
| CATGGTCACC CAGCACGGGA AGCCCATGTT TACCAAGGTA TGTACAGAAG GCAGACTGAT | 540 |
| CTTGGAGTTC ACCTTTGATG ATCTCATGAG AATCAAAACA TGGCACTTTA CCATTAGACA | 600 |
| ATACCGAGAG TTAGTCCCGA GAAGCATCCT AGCCATGCAT GCACAAGATC CTCAGGTCCT | 660 |
| GGATCAGCTG TCCAAAAACA TCACCAGGAT GGGGCTAACA AACTTCACCC TCAACTACCT | 720 |
| CAGGTTGTGT GTAATATTGG AGCCAATGCA GGAACTGATG TCGAGACATA AAACTTACAA | 780 |
| CCTCAGTCCC CGAGACTGCC TGAAGACCTG CTTGTTTCAG AAGTGGCAGA GGATGGTGGC | 840 |
| TCCGCCAGCA GAACCCACAA GGCAACCAAC AACCAAACGG AGAAAAAGGA AAAATTCCAC | 900 |
| CAGCAGCACT TCCAACAGCA GCGCTGGGAA CAATGCAAAC AGCACTGGCA GCAAGAAGAA | 960 |
| GACCACAGCT GCAAACCTGA GTCTGTCCAG TCAGGTACCT GATGTGATGG TGGTAGGAGA | 1020 |
| GCCAACTCTG ATGGGAGGTG AGTTTGGGGA CGAGGACGAA AGGCTAATCA CTAGATTAGA | 1080 |
| AAACACGCAA TATGATGCGG CCAACGGCAT GGACGACGAG GAGGACTTCA ACAATTCACC | 1140 |
| CGCGCTGGGG AACAACAGCC CGTGGAACAG TAAACCTCCC GCCACTCAAG AGACCAAATC | 1200 |
| AGAAAACCCC CCACCCCAGG CTTCCCAATA AGATGATCGG CACCAGAATC CACTGTCAAT | 1260 |
| AGGCCCGTGG GTGATCATTA CAATTGCAAA TCTTTACTTA CAGGAGAGGA AACAGAAGAG | 1320 |
| ATAAAAACTT TTCCATGCAA ATATCTATTT CTAAACCACA ATGATCTGAT TTTCTTTCTT | 1380 |
| CTTTCTTTTT TTCTAATTGA GAGGATTATT CCCAGTAAGC TTCCATGACC CTTTCTTGGA | 1440 |
| GGCCTTCACA GGTAATACAG ATACTGGCAC TGATTGTAAT TAAAATGAGA GAAAACTCTA | 1500 |
| GCGCATCTTC TGGCACGGTT TTAACAACGT GTTTGTGTTG AATTTCCTTT TTATGCATCA | 1560 |
| AACGAAGGCC ATATTGTCCA TAAATGCTCA GTGCTCAGGA TCTCATTAAT ATGCCGAACC | 1620 |
| TAACTACAGA TGACTTTTTA ATATTGTAAA ATATTTTCTG CTTTTTGACT TGCATCTGAG | 1680 |
| AGTTTCTTGT TTCAGTAAAA AAAGAAAAGA CAAAAAAATC AGCTTTGGAA AGTAATTTAA | 1740 |
| ATGTACCTTA TTTTTTTTTT CTTTATGTTT TCTTTCATTG GGCAACAGCT AAGAGGGCCC | 1800 |
| AGCAAGGTAA TTTATGGTTG AGCTGATGTC AATTGGTTCT TGTCTTGAGT CGACTCAATT | 1860 |
| TAGCCCAAGT GCTGAAACAA GAAATGTCAT TTTTTTCATC AAAGACACCA GGGCAGATTT | 1920 |
| TTAAGTAAAG AAAGACAATT GGACCCTTAA GAATTTATGC ATTTGTAAAG TTGCTGTTGA | 1980 |
| TCCAAATATT TTCAAGCCAT GTAATCCATT GGTTTTGTGG GCAGTTTAAT AAACCTGAAC | 2040 |
| CTTTGTGTGT TTTCTAATTG TACCTGAGTT GACCATCCTT TCTTTTTATA GTATATTTCT | 2100 |
| TGTATGATAT TTTGTAAAGC TCTCACCTGG TTCTTTTATG GGGACTTTTC GTTTTTGGGC | 2160 |
| AACTCCAGTG TATTTATGTG AAACTTTATA AGAGAATTAA TTTTTCCATT TGCATATTAA | 2220 |
| TATGTTCCTC CACACATGTA AAGGCACAGT GGCTCCGTGT GTTAAAAAAC AGCTGTATTT | 2280 |
| TATGTATGCT TTACTGATAA GTGTGCCAAT AATAAACTGT GTTAATGACC | |

AAE1 DNA sequence
Gene name: guanine nucleotide binding protein 11
Unigene number: Hs.83381
Probeset Accession #: U31384
Nucleic Acid Accession #: NM_004126.1
Coding sequence: 108-329 (predicted start/stop codons underlined)

| | |
|---|---|
| GGCACGAGCT CGTGCCGGCC TTCAGTTGTT TCGGGACGCG CCGAGCTTCG CCGCTCTTCC | 60 |
| AGCGGCTCCG CTGCCAGAGC TAGCCCGAGC CCGGTTCTGG GGCGAAAATG CCTGCCCTTC | 120 |
| ACATCGAAGA TTTGCCAGAG AAGGAAAAAC TGAAAATGGA AGTTGAGCAG CTTCGCAAAG | 180 |
| AAGTGAAGTT GCAGAGACAA CAAGTGTCTA AATGTTCTGA AGAAATAAAG AACTATATTG | 240 |
| AAGAACGTTC TGGAGAGGAT CCTCTAGTAA AGGGAATTCC AGAAGACAAG AACCCCTTTA | 300 |
| AAGAAAAAGG CAGCTGTGTT ATTTCATAAA TAACTTGGGA GAAACTGCAT CCTAAGTGGA | 360 |
| AGAACTAGTT TGTTTTAGTT TTCCCAGATA AAACCAACAT GCTTTTTAAG GAAGGAAGAA | 420 |
| TGAAATTAAA AGGAGACTTT CTTAAGCACC ATATAGATAG GGTTATGTAT AAAAGCATAT | 480 |
| GTGCTACTCA TCTTTGCTCA CTATGCAGTC TTTTTTAAGA GAGCAGAGAG TATCAGATGT | 540 |
| ACAATTATGG AAATAAGAAC ATTACTTGAG CATGACACTT CTTTCAGTAT ATTGCTTGAT | 600 |
| GCTTCAAATA AAGTTTTGTC TT | |

AAE2 DNA sequence
Gene name: Transcription factor 4 (immunoglobulin transcription factor 2) (ITF-2)
(SL3-3 Enhancer factor 2) (SEF-2)
Unigene number: Hs.289068
Probeset Accession #: M74719
Nucleic Acid Accession #: NM_003199.1
coding sequence: 200-2203 (predicted start/stop codons underlined)

| | |
|---|---|
| CGGGGGGATC TTGGCTGTGT GTCTGCGGAT CTGTAGTGGC GGCGGCGGCG GCGGCGGCGG | 60 |
| GGAGGCAGCA GGCGCGGGAG CGGGCGCAGG AGCAGGCGGC GGCGGTGGCG GCGGCGGTTA | 120 |
| GACATGAACG CCGCCTCGGC GCCGGCGGTG CACGGAGAGC CCCTTCTCGC GCGCGGGCGG | 180 |
| TTTGTGTGAT TTTGCTAAAA TGCATCACCA ACAGCGAATG GCTGCCTTAG GGACGGACAA | 240 |
| AGAGCTGAGT GATTTACTGG ATTTCAGTGC GATGTTTTCA CCTCCTGTGA GCAGTGGGAA | 300 |
| AAATGGACCA ACTTCTTTGG CAAGTGGACA TTTTACTGGC TCAAATGTAG AAGACAGAAG | 360 |
| TAGCTCAGGG TCCTGGGGGA ATGGAGGACA TCCAAGCCCG TCCAGGAACT ATGGAGATGG | 420 |
| GACTCCCTAT GACCACATGA CCAGCAGGGA CCTTGGGTCA CATGACAATC TCTCTCCACC | 480 |
| TTTTGTCAAT TCCAGAATAC AAAGTAAAAC AGAAAGGGGC TCATACTCAT CTTATGGGAG | 540 |
| AGAATCAAAC TTACAGGGTT GCCACCAGCA GAGTCTCCTT GGAGGTGACA TGGATATGGG | 600 |
| CAACCCAGGA ACCCTTTCGC CCACCAAACC TGGTTCCCAG TACTATCAGT ATTCTAGCAA | 660 |
| TAATCCCCGA AGGAGGCCTC TTCACAGTAG TGCCATGGAG GTACAGACAA AGAAAGTTCG | 720 |
| AAAAGTTCCT CCAGGTTTGC CATCTTCAGT CTATGCTCCA TCAGCAAGCA CTGCCGACTA | 780 |
| CAATAGGGAC TCGCCAGGCT ATCCTTCCTC CAAACCAGCA ACCAGCACTT TCCCTAGCTC | 840 |
| CTTCTTCATG CAAGATGGCC ATCACAGCAG TGACCCTTGG AGCTCCTCCA GTGGGATGAA | 900 |
| TCAGCCTGGC TATGCAGGAA TGTTGGGCAA CTCTTCTCAT ATTCCACAGT CCAGCAGCTA | 960 |
| CTGTAGCCTG CATCCACATG AACGTTTGAG CTATCCATCA CACTCCTCAG CAGACATCAA | 1020 |
| TTCCAGTCTT CCTCCGATGT CCACTTTCCA TCGTAGTGGT ACAAACCATT ACAGCACCTC | 1080 |
| TTCCTGTACG CCTCCTGCCA ACGGGACAGA CAGTATAATG GCAAATAGAG GAAGCGGGGC | 1140 |
| AGCCGGCAGC TCCCAGACTG GAGATGCTCT GGGGAAAGCA CTTGCTTCGA TCTATTCTCC | 1200 |
| AGATCACACT AACAACAGCT TTTCATCAAA CCCTTCAACT CCTGTTGGCT CTCCTCCATC | 1260 |
| TCTCTCAGCA GGCACAGCTG TTTGGTCTAG AAATGGAGGA CAGGCCTCAT CGTCTCCTAA | 1320 |
| TTATGAAGGA CCCTTACACT CTTTGCAAAG CCGAATTGAA GATCGTTTAG AAAGACTGGA | 1380 |
| TGATGCTATT CATGTTCTCC GGAACCATGC AGTGGGCCCA TCCACAGCTA TGCCTGGTGG | 1440 |
| TCATGGGGAC ATGCATGGAA TCATTGGACC TTCTCATAAT GGAGCCATGG GTGGTCTGGG | 1500 |
| CTCAGGGTAT GGAACCGGCC TTCTTTCAGC CAACAGACAT TCACTCATGG TGGGGACCCA | 1560 |
| TCGTGAAGAT GGCGTGGCCC TGAGAGGCAG CCATTCTCTT CTGCCAAACC AGGTTCCGGT | 1620 |
| TCCACAGCTT CCTGTCCAGT CTGCGACTTC CCCTGACCTG AACCCACCCC AGGACCCTTA | 1680 |
| CAGAGGCATG CCACCAGGAC TACAGGGGCA GAGTGTCTCC TCTGGCAGCT CTGAGATCAA | 1740 |
| ATCCGATGAC GAGGGTGATG AGAACCTGCA AGACACGAAA TCTTCGGAGG ACAAGAAATT | 1800 |
| AGATGACGAC AAGAAGGATA TCAAATCAAT TACTAGCAAT AATGACGATG AGGACCTGAC | 1860 |
| ACCAGAGCAG AAGGCAGAGC GTGAGAAGGA GCGGAGGATG GCCAACAATG CCCGAGAGCG | 1920 |
| TCTGCGGGTC CGTGACATCA ACGAGGCTTT CAAAGAGCTC GGCCGCATGG TGCAGCTCCA | 1980 |
| CCTCAAGAGT GACAAGCCCC AGACCAAGCT CCTGATCCTC CACCAGGCGG TGGCCGTCAT | 2040 |
| CCTCAGTCTG GAGCAGCAAG TCCGAGAAAG GAATCTGAAT CCGAAAGCTG CGTGTCTGAA | 2100 |
| AAGAAGGGAG GAAGAGAAGG TGTCCTCGGA GCCTCCCCCT CTCTCCTTGG CCGGCCCACA | 2160 |
| CCCTGGAATG GGAGACGCAT CGAATCACAT GGGACAGATG TAAAAGGGTC CAAGTTGCCA | 2220 |
| CATTGCTTCA TTAAAACAAG AGACCACTTC CTTAACAGCT GTATTATCTT AAACCCACAT | 2280 |
| AAACACTTCT CCTTAACCCC CATTTTTGTA ATATAAGACA AGTCTGAGTA GTTATGAATC | 2340 |
| GCAGACGCAA GAGGTTTCAG CATTCCCAAT TATCAAAAAA CAGAAAAACA AAAAAAAGAA | 2400 |
| AGAAAAAAGT GCAACTTGAG GGACGACTTT CTTTAACATA TCATTCAGAA TGTGCAAAGC | 2460 |
| AGTATGTACA GGCTGAGACA CAGCCCAGAG ACTGAACGGC | |

AAE4 DNA sequence
Gene name: phosphatidylcholine 2-acylhydrolase
Unigene number: Hs.211587
Probeset Accession #: M68874
Nucleic Acid Accession #: M68874
Coding sequence: 139-2388 (predicted start/stop codons underlined)

| | |
|---|---|
| GAATTCTCCG GAGCTGAAAA AGGATCCTGA CTGAAAGCTA GAGGCATTGA GGAGCCTGAA | 60 |
| GATTCTCAGG TTTTAAAGAC GCTAGAGTGC CAAAGAAGAC TTTGAAGTGT GAAAACATTT | 120 |
| CCTGTAATTG AAACCAAAAT GTCATTTATA GATCCTTACC AGCACATTAT AGTGGAGCAC | 180 |
| CAGTATTCCC ACAAGTTTAC GGTAGTGGTG TTACGTGCCA CCAAAGTGAC AAAGGGGGCC | 240 |
| TTTGGTGACA TGCTTGATAC TCCAGATCCC TATGTGGAAC TTTTTATCTC TACAACCCCT | 300 |
| GACAGCAGGA AGAGAACAAG ACATTTCAAT AATGACATAA ACCCTGTGTG GAATGAGACC | 360 |
| TTTGAATTTA TTTTGGATCC TAATCAGGAA AATGTTTTGG AGATTACGTT AATGGATGCC | 420 |
| AATTATGTCA TGGATGAAAC TCTAGGGACA GCAACATTTA CTGTATCTTC TATGAAGGTG | 480 |
| GGAGAAAAGA AAGAAGTTCC TTTTATTTTC AACCAAGTCA CTGAAATGGT TCTAGAAATG | 540 |
| TCTCTTGAAG TTTGCTCATG CCCAGACCTA CGATTTAGTA TGGCTCTGTG TGATCAGGAG | 600 |
| AAGACTTTCA GACAACAGAG AAAAGAACAC ATAAGGGAGA GCATGAAGAA ACTCTTGGGT | 660 |
| CCAAAGAATA GTGAAGGATT GCATTCTGCA CGTGATGTGC CTGTGGTAGC CATATTGGGT | 720 |
| TCAGGTGGGG GTTTCCGAGC CATGGTGGGA TTCTCTGGTG TGATGAAGGC ATTATACGAA | 780 |
| TCAGGAATTC TGGATTGTGC TACCTACGTT GCTGGTCTTT CTGGCTCCAC CTGGTATATG | 840 |
| TCAACCTTGT ATTCTCACCC TGATTTTCCA GAGAAAGGGC CAGAGGAGAT TAATGAAGAA | 900 |
| CTAATGAAAA ATGTTAGCCA CAATCCCCTT TTACTTCTCA CACCACAGAA AGTTAAAAGA | 960 |
| TATGTTGAGT CTTTATGGAA GAAGAAAAGC TCTGGACAAC CTGTCACCTT TACTGACATC | 1020 |
| TTTGGGATGT TAATAGGAGA AACACTAATT CATAATAGAA TGAATACTAC TCTGAGCAGT | 1080 |
| TTGAAGGAAA AAGTTAATAC TGCACAATGC CCTTTACCTC TTTTCACCTG TCTTCATGTC | 1140 |
| AAACCTGACG TTTCAGAGCT GATGTTTGCA GATTGGGTTG AATTTAGTCC ATACGAAATT | 1200 |
| GGCATGGCTA AATACGGTAC TTTTATGGCT CCCGACTTAT TTGGAAGCAA ATTTTTTATG | 1260 |
| GGAACAGTCG TTAAGAAGTA TGAAGAAAAC CCCTTGCATT TCTTAATGGG TGTCTGGGGC | 1320 |
| AGTGCCTTTT CCATATTGTT CAACAGAGTT TTGGGCGTTT CTGGTTCACA AAGCAGAGGC | 1380 |
| TCCACAATGG AGGAAGAATT AGAAAATATT ACCACAAAGC ATATTGTGAG TAATGATAGC | 1440 |
| TCGGACAGTG ATGATGAATC ACACGAACCC AAAGGCACTG AAAATGAAGA TGCTGGAAGT | 1500 |
| GACTATCAAA GTGATAATCA AGCAAGTTGG ATTCATCGTA TGATAATGGC CTTGGTGAGT | 1560 |
| GATTCAGCTT TATTCAATAC CAGAGAAGGA CGTGCTGGGA AGGTACACAA CTTCATGCTG | 1620 |
| GGCTTGAATC TCAATACATC TTATCCACTG TCTCCTTTGA GTGACTTTGC CACACAGGAC | 1680 |
| TCCTTTGATG ATGATGAACT GGATGCAGCT GTAGCAGATC CTGATGAATT TGAGCGAATA | 1740 |
| TATGAGCCTC TGGATGTCAA AAGTAAAAAG ATTCATGTAG TGGACAGTGG GCTCACATTT | 1800 |
| AACCTGCCGT ATCCCTTGAT ACTGAGACCT CAGAGAGGGG TTGATCTCAT AATCTCCTTT | 1860 |
| GACTTTTCTG CAAGGCCAAG TGACTCTAGT CCTCCGTTCA AGGAACTTCT ACTTGCAGAA | 1920 |
| AAGTGGGCTA AAATGAACAA GCTCCCCTTT CCAAAGATTG ATCCTTATGT GTTTGATCGG | 1980 |
| GAAGGGCTGA AGGAGTGCTA TGTCTTTAAA CCCAAGAATC CTGATATGGA GAAAGATTGC | 2040 |
| CCAACCATCA TCCACTTTGT TCTGGCCAAC ATCAACTTCA GAAAGTACAA GGCTCCAGGT | 2100 |
| GTTCCAAGGG AAACTGAGGA AGAGAAAGAA ATCGCTGACT TTGATATTTT TGATGACCCA | 2160 |
| GAATCACCAT TTTCAACCTT CAATTTTCAA TATCCAAATC AAGCATTCAA AAGACTACAT | 2220 |
| GATCTTATGC ACTTCAATAC TCTGAACAAC ATTGATGTGA TAAAAGAAGC CATGGTTGAA | 2280 |
| AGCATTGAAT ATAGAAGACA GAATCCATCT CGTTGCTCTG TTTCCCTTAG TAATGTTGAG | 2340 |
| GCAAGAAGAT TTTTCAACAA GGAGTTTCTA AGTAAACCCA AAGCATAGTT CATGTACTGG | 2400 |
| AAATGGCAGC AGTTTCTGAT GCTGAGGCAG TTTGCAATCC CATGACAACT GGATTTAAAA | 2460 |
| GTACAGTACA GATAGTCGTA CTGATCATGA GAGACTGGCT GATACTCAAA GTTGCAGTTA | 2520 |
| CTTAGCTGCA TGAGAATAAT ACTATTATAA GTTAGGTGAC AAATGATGTT GATTATGTAA | 2580 |
| GGATATACTT AGCTACATTT TCAGTCAGTA TGAACTTCCT GATACAAATG TAGGGATATA | 2640 |
| TACTGTATTT TTAAACATTT CTCACCAACT TTCTTATGTG TGTTCTTTTT AAAAATTTTT | 2700 |
| TTTCTTTTAA AATATTTAAC AGTTCAATCT CAATAAGACC TCGCATTATG TATGAATGTT | 2760 |
| ATTCACTGAC TAGATTTATT CATACCATGA GACAACACTA TTTTTATTTA TATATGCATA | 2820 |
| TATATACATA CATGAAATAA ATACATCAAT ATAAAAATAA AAAAAAACGG AATTC | |

ACA1 DNA sequence
Gene name: tissue factor pathway inhibitor 2 TFPI2, placental protein 5 (PP5)
Unigene number: Hs.78045
Probeset Accession #: D29992
Nucleic Acid Accession #: D29992.1
Coding sequence: 57-764 (predicted start/stop codons underlined)

| | |
|---|---|
| GCCGCCAGCG GCTTTCTCGG ACGCCTTGCC CAGCGGGCCG CCCGACCCCC TGCACCATGG | 60 |
| ACCCCGCTCG CCCCCTGGGG CTGTCGATTC TGCTGCTTTT CCTGACGGAG GCTGCACTGG | 120 |
| GCGATGCTGC TCAGGAGCCA ACAGGAAATA ACGCGGAGAT CTGTCTCCTG CCCCTAGACT | 180 |
| ACGGACCCTG CCGGGCCCTA CTTCTCCGTT ACTACTACGA CAGGTACACG CAGAGCTGCC | 240 |
| GCCAGTTCCT GTACGGGGGC TGCGAGGGCA ACGCCAACAA TTTCTACACC TGGGAGGCTT | 300 |
| GCGACGATGC TTGCTGGAGG ATAGAAAAAG TTCCCAAAGT TTGCCGGCTG CAAGTGAGTG | 360 |
| TGGACGACCA GTGTGAGGGG TCCACAGAAA AGTATTTCTT TAATCTAAGT TCCATGACAT | 420 |
| GTGAAAAATT CTTTTCCGGT GGGTGTCACC GGAACCGGAT TGAGAACAGG TTTCCAGATG | 480 |
| AAGCTACTTG TATGGGCTTC TGCGCACCAA AGAAAATTCC ATCATTTTGC TACAGTCCAA | 540 |
| AAGATGAGGG ACTGTGCTCT GCCAATGTGA CTCGCTATTA TTTTAATCCA AGATACAGAA | 600 |
| CCTGTGATGC TTTCACCTAT ACTGGCTGTG GAGGGAATGA CAATAACTTT GTTAGCAGGG | 660 |
| AGGATTGCAA ACGTGCATGT GCAAAAGCTT TGAAAAAGAA AAAGAAGATG CCAAAGCTTC | 720 |
| GCTTTGCCAG TAGAATCCGG AAAATTCGGA AGAAGCAATT TTAAACATTC TTAATATGTC | 780 |
| ATCTTGTTTG TCTTTATGGC TTATTTGCCT TTATGGTTGT ATCTGAAGAA TAATATGACA | 840 |
| GCATGAGGAA ACAAATCATT GGTGATTTAT TCACCAGTTT TTATTAATAC AAGTCACTTT | 900 |
| TTCAAAAATT TGGATTTTTT TATATATAAC TAGCTGCTAT TCAAATGTGA GTCTACCATT | 960 |
| TTTAATTTAT GGTTCAACTG TTTGTGAGAC GAATTCTTGC AATGCATAAG ATATAAAAGC | 1020 |
| AAATATGACT CACTCATTTC TTGGGGTCGT ATTCCTGATT TCAGAAGAGG ATCATAACTG | 1080 |
| AAACAACATA AGACAATATA ATCATGTGCT TTTAACATAT TTGAGAATAA AAAGGACTAG | 1140 |
| CC | |

ACB8 DNA sequence
Gene name: myosin X
Unigene number: Hs.61638
Probeset Accession #: N77151
Nucleic Acid Accession #: NM_012334
Coding sequence: 223-6399 (predicted start/stop codons underlined)

| | |
|---|---|
| GAGACAAAGG CTGCCGTCGG GACGGGCGAG TTAGGGACTT GGGTTTGGGC GAACAAAAGG | 60 |
| TGAGAAGGAC AAGAAGGGAC CGGGCGATGG CAGCAGGGGA GCCCCGCGGG CGCGCGTCCT | 120 |
| CGGGAGTGGC GCCGTGACAC GCATGGTTTC CCCCGACCCG CGGCGGCGCT GACTTCCGCG | 180 |
| AGTCGGAGCG GCACTCGGCG AGTCCGGGAC TGCGCTGGAA CAATGGATAA CTTCTTCACC | 240 |
| GAGGGAACAC GGGTCTGGCT GAGAGAAAAT GGCCAGCATT TTCCAAGTAC TGTAAATTCC | 300 |
| TGTGCAGAAG GCATCGTCGT CTTCCGGACA GACTATGGTC AGGTATTCAC TTACAAGCAG | 360 |
| AGCACAATTA CCCACCAGAA GGTGACTGCT ATGCACCCCA CGAACGAGGA GGGCGTGGAT | 420 |
| GACATGGCGT CCTTGACAGA GCTCCATGGC GGCTCCATCA TGTATAACTT ATTCCAGCGG | 480 |
| TATAAGAGAA ATCAAATATA TACCTACATC GGCTCCATCC TGGCCTCCGT GAACCCCTAC | 540 |
| CAGCCCATCG CCGGGCTGTA CGAGCCTGCC ACCATGGAGC AGTACAGCCG GCGCCACCTG | 600 |
| GGCGAGCTGC CCCCGCACAT CTTCGCCATC GCCAACGAGT GCTACCGCTG CCTGTGGAAG | 660 |
| CGCTACGACA ACCAGTGCAT CCTCATCAGT GGTGAAAGTG GGGCAGGTAA AACCGAAAGC | 720 |
| ACTAAATTGA TCCTCAAGTT TCTGTCAGTC ATCAGTCAAC AGTCTTTGGA ATTGTCCTTA | 780 |
| AAGGAGAAGA CATCCTGTGT TGAACGAGCT ATTCTTGAAA GCAGCCCCAT CATGGAAGCT | 840 |
| TTCGGCAATG CGAAGACCGT GTACAACAAC AACTCTAGTC GCTTTGGGAA GTTTGTTCAG | 900 |
| CTGAACATCT GTCAGAAAGG AAATATTCAG GGCGGGAGAA TTGTAGATTA TTTATTAGAA | 960 |
| AAAAACCGAG TAGTAAGGCA AAATCCCGGG GAAAGGAATT ATCACATATT TTATGCACTG | 1020 |
| CTGGCAGGGC TGGAACATGA AGAAAGAGAA GAATTTTATT TATCTACGCC AGAAAACTAC | 1080 |
| CACTACTTGA ATCAGTCTGG ATGTGTAGAA GACAAGACAA TCAGTGACCA GGAATCCTTT | 1140 |
| AGGGAAGTTA TTACGGCAAT GGACGTGATG CAGTTCAGCA AGGAGGAAGT TCGGGAAGTG | 1200 |
| TCGAGGCTGC TTGCTGGTAT ACTGCATCTT GGGAACATAG AATTTATCAC TGCTGGTGGG | 1260 |
| GCACAGGTTT CCTTCAAAAC AGCTTTGGGC AGATCTGCGG AGTTACTTGG GCTGGACCCA | 1320 |
| ACACAGCTCA CAGATGCTTT GACCCAGAGA TCAATGTTCC TCAGGGGAGA AGAGATCCTC | 1380 |
| ACGCCTCTCA ATGTTCAACA GGCAGTAGAC AGCAGGGACT CCCTGGCCAT GGCTCTGTAT | 1440 |
| GCGTGCTGCT TTGAGTGGGT AATCAAGAAG ATCAACAGCA GGATCAAAGG CAATGAGGAC | 1500 |
| TTCAAGTCTA TTGGCATCCT CGACATCTTT GGATTTGAAA ACTTTGAGGT TAATCACTTT | 1560 |
| GAACAGTTCA ATATAAACTA TGCAAACGAG AAACTTCAGG AGTACTTCAA CAAGCATATT | 1620 |
| TTTTCTTTAG AACAACTAGA ATATAGCCGG GAAGGATTAG TGTGGGAAGA TATTGACTGG | 1680 |
| ATAGACAATG GAGAATGCCT GGACTTGATT GAGAAGAAAC TTGGCCTCCT AGCCCTTATC | 1740 |
| AATGAAGAAA GCCATTTTCC TCAAGCCACA GACAGCACCT TATTGGAGAA GCTACACAGT | 1800 |
| CAGCATGCGA ATAACCACTT TTATGTGAAG CCCAGAGTTG CAGTTAACAA TTTTGGAGTG | 1860 |
| AAGCACTATG CTGGAGAGGT GCAATATGAT GTCCGAGGTA TCTTGGAGAA GAACAGAGAT | 1920 |
| ACATTTCGAG ATGACCTTCT CAATTTGCTA AGAGAAAGCC GATTTGACTT TATCTACGAT | 1980 |
| CTTTTTGAAC ATGTTTCAAG CCGCAACAAC CAGGATACCT TGAAATGTGG AAGCAAACAT | 2040 |
| CGGCGGCCTA CAGTCAGCTC ACAGTTCAAG GACTCACTGC ATTCCTTAAT GGCAACGCTA | 2100 |
| AGCTCCTCTA ATCCTTTCTT TGTTCGCTGT ATCAAGCCAA ACATGCAGAA GATGCCAGAC | 2160 |
| CAGTTTGACC AGGCGGTTGT GCTGAACCAG CTGCGGTACT CAGGGATGCT GGAGACTGTG | 2220 |
| AGAATCCGCA AAGCTGGGTA TGCGGTCCGA AGACCCTTTC AGGACTTTTA CAAAAGGTAT | 2280 |
| AAAGTGCTGA TGAGGAATCT GGCTCTGCCT GAGGACGTCC GAGGGAAGTG CACGAGCCTG | 2340 |
| CTGCAGCTCT ATGATGCCTC CAACAGCGAG TGGCAGCTGG GGAAGACCAA GGTCTTTCTT | 2400 |
| CGAGAATCCT TGGAACAGAA ACTGGAGAAG CGGAGGGAAG AGGAAGTGAG CCACGCGGCC | 2460 |
| ATGGTGATTC GGGCCCATGT CTTGGGCTTC TTAGCACGAA AACAATACAG AAAGGTCCTT | 2520 |
| TATTGTGTGG TGATAATACA GAAGAATTAC AGAGCATTCC TTCTGAGGAG GAGATTTTTG | 2580 |
| CACCTGAAAA AGGCAGCCAT AGTTTTCCAG AAGCAACTCA GAGGTCAGAT TGCTCGGAGA | 2640 |
| GTTTACAGAC AATTGCTGGC AGAGAAAAGG GAGCAAGAAG AAAAGAAGAA ACAGGAAGAG | 2700 |
| GAAGAAAAGA AGAAACGGGA GGAAGAAGAA AGAGAAAGAG AGAGAGAGCG AAGAGAAGCC | 2760 |
| GAGCTCCGCG CCCAGCAGGA AGAAGAAACG AGGAAGCAGC AAGAACTCGA AGCCTTGCAG | 2820 |
| AAGAGCCAGA AGGAAGCTGA ACTGACCCGT GAACTGGAGA AACAGAAGGA AAATAAGCAG | 2880 |
| GTGGAAGAGA TCCTCCGTCT GGAGAAAGAA ATCGAGGACC TGCAGCGCAT GAAGGAGCAG | 2940 |
| CAGGAGCTGT CGCTGACCGA GGCTTCCCTG CAGAAGCTGC AGGAGCGGCG GGACCAGGAG | 3000 |
| CTCCGCAGGC TGGAGGAGGA AGCGTGCAGG GCGGCCCAGG AGTTCCTCGA GTCCCTCAAT | 3060 |
| TTCGACGAGA TCGACGAGTG TGTCCGGAAT ATCGAGCGGT CCCTGTCGGT GGGAAGCGAA | 3120 |
| TTTTCCAGCG AGCTGGCTGA GAGCGCATGC GAGGAGAAGC CCAACTTCAA CTTCAGCCAG | 3180 |
| CCCTACCCAG AGGAGGAGGT CGATGAGGGC TTCGAAGCCG ACGACGACGC CTTCAAGGAC | 3240 |
| TCCCCCAACC CCAGCGAGCA CGGCCACTCA GACCAGCGAA CAAGTGGCAT CCGGACCAGC | 3300 |
| GATGACTCTT CAGAGGAGGA CCCATACATG AACGACACGG TGGTGCCCAC CAGCCCCAGT | 3360 |
| GCGGACAGCA CGGTGCTGCT CGCCCCATCA GTGCAGGACT CCGGGAGCCT ACACAACTCC | 3420 |
| TCCAGCGGCG AGTCCACCTA CTGCATGCCC CAGAACGCTG GGGACTTGCC CTCCCCAGAC | 3480 |
| GGCGACTACG ACTACGACCA GGATGACTAT GAGGACGGTG CCATCACTTC CGGCAGCAGC | 3540 |
| GTGACCTTCT CCAACTCCTA CGGCAGCCAG TGGTCCCCCG ACTACCGCTG CTCTGTGGGG | 3600 |
| ACCTACAACA GCTCGGGTGC CTACCGGTTC AGCTCTGAGG GGGCGCAGTC CTCGTTTGAA | 3660 |
| GATAGTGAAG AGGACTTTGA TTCCAGGTTT GATACAGATG ATGAGCTTTC ATACCGGCGT | 3720 |
| GACTCTGTGT ACAGCTGTGT CACTCTGCCG TATTTCCACA GCTTTCTGTA CATGAAAGGT | 3780 |
| GGCCTGATGA ACTCTTGGAA ACGCCGCTGG TGCGTCCTCA AGGATGAAAC CTTCTTGTGG | 3840 |
| TTCCGCTCCA AGCAGGAGGC CCTCAAGCAA GGCTGGCTCC ACAAAAAAGG GGGGGGCTCC | 3900 |
| TCCACGCTGT CCAGGAGAAA TTGGAAGAAG CGCTGGTTTG TCCTCCGCCA GTCCAAGCTG | 3960 |
| ATGTACTTTG AAAACGACAG CGAGGAGAAG CTCAAGGGCA CCGTAGAAGT GCGAACGGCA | 4020 |
| AAAGAGATCA TAGATAACAC CACCAAGGAG AATGGGATCG ACATCATTAT GGCCGATAGG | 4080 |
| ACTTTCCACC TGATTGCAGA GTCCCCAGAA GATGCCAGCC AGTGGTTCAG CGTGCTGAGT | 4140 |
| CAGGTCCACG CGTCCACGGA CCAGGAGATC CAGGAGATGC ATGATGAGCA GGGAAACCCA | 4200 |
| CAGAATGCTG TGGGCACCTT GGATGTGGGG CTGATTGATT CTGTGTGTGC CTCGACAGC | 4260 |
| CCTGATAGAC CCAACTCGTT TGTGATCATC ACGGCCAACC GGGTGCTGCA CTGCAACGCC | 4320 |
| GACACGCCGG AGGAGATGCA CCACTGGATA ACCCTGCTGC AGAGGTCCAA AGGGGACACC | 4380 |
| AGAGTGGAGG GCCAGGAATT CATCGTGAGA GGATGGTTGC ACAAAGAGGT GAAGAACAGT | 4440 |
| CCGAAGATGT CTTCACTGAA ACTGAAGAAA CGGTGGTTTG TACTCACCCA CAATTCCCTG | 4500 |
| GATTACTACA AGAGTTCAGA GAAGAACGCG CTCAAACTGG GGACCCTGGT CCTCAACAGC | 4560 |
| CTCTGCTCTG TCGTCCCCCC AGATGAGAAG ATATTCAAAG AGACAGGCTA CTGGAACGTC | 4620 |
| ACCGTGTACG GGCGCAAGCA CTGTTACCGG CTCTACACCA AGCTGCTCAA CGAGGCCACC | 4680 |
| CGGTGGTCCA GTGCCATTCA AAACGTGACT GACACCAAGG CCCCGATCGA CACCCCCACC | 4740 |
| CAGCAGCTGA TTCAAGATAT CAAGGAGAAC TGCCTGAACT CGGATGTGGT GGAACAGATT | 4800 |
| TACAAGCGGA ACCCGATCCT TCGATACACC CATGACCCCT TGCACTCCCC GCTCCTGCCC | 4860 |
| CTTCCGTATG GGGACATAAA TCTCAACTTG CTCAAAGACA AAGGCTATAC CACCCTTCAG | 4920 |
| GATGAGGCCA TCAAGATATT CAATTCCCTG CAGCAACTGG AGTCCATGTC TGACCCAATT | 4980 |
| CCAATAATCC AGGGCATCCT ACAGACAGGG CATGACCTGC GACCTCTGCG GGACGAGCTG | 5040 |
| TACTGCCAGC TTATCAAACA GACCAACAAA GTGCCCCACC CCGGCAGTGT GGGCAACCTG | 5100 |
| TACAGCTGGC AGATCCTGAC ATGCCTGAGC TGCACCTTCC TGCCGAGTCG AGGGATTCTC | 5160 |
| AAGTATCTCA AGTTCCATCT GAAAAGGATA CGGGAACAGT TTCCAGGAAC CGAGATGGAA | 5220 |
| AAATACGCTC TCTTCACTTA CGAATCTCTT AAGAAAACCA AATGCCGAGA GTTTGTGCCT | 5280 |
| TCCCGAGATG AAATAGAAGC TCTGATCCAC AGGCAGGAAA TGACATCCAC GGTCTATTGC | 5340 |
| CATGGCGGCG GCTCCTGCAA GATCACCATC AACTCCCACA CCACTGCTGG GGAGGTGGTG | 5400 |
| GAGAAGCTGA TCCGAGGCCT GGCCATGGAG GACAGCAGGA ACATGTTTGC TTTGTTTGAA | 5460 |
| TACAACGGCC ACGTCGACAA AGCCATTGAA AGTCGAACCG TCGTAGCTGA TGTCTTAGCC | 5520 |
| AAGTTTGAAA AGCTGGCTGC CACATCCGAG GTTGGGGACC TGCCATGGAA ATTCTACTTC | 5580 |
| AAACTTTACT GCTTCCTGGA CACAGACAAC GTGCCAAAAG ACAGTGTGGA GTTTGCATTT | 5640 |
| ATGTTTGAAC AGGCCCACGA AGCGGTTATC CATGGCCACC ATCCAGCCCC GGAAGAAAAC | 5700 |
| CTCCAGGTTC TTGCTGCCCT GCGACTCCAG TATCTGCAGG GGGATTATAC TCTGCACGCT | 5760 |
| GCCATCCCAC CTCTCGAAGA GGTTTATTCC CTGCAGAGAC TCAAGGCCCG CATCAGCCAG | 5820 |
| TCAACCAAAA CCTTCACCCC TTGTGAACGG CTGGAGAAGA GGCGGACGAG CTTCCTAGAG | 5880 |
| GGGACCCTGA GGCGGAGCTT CCGGACAGGA TCCGTGGTCC GGCAGAAGGT CGAGGAGGAG | 5940 |
| CAGATGCTGG ACATGTGGAT TAAGGAAGAA GTCTCCTCTG CTCGAGCCAG TATCATTGAC | 6000 |
| AAGTGGAGGA AATTTCAGGG AATGAACCAG GAACAGGCCA TGGCCAAGTA CATGGCCTTG | 6060 |
| ATCAAGGAGT GGCCTGGCTA TGGCTCGACG CTGTTTGATG TGGAGTGCAA GGAAGGTGGC | 6120 |
| TTCCCTCAGG AACTCTGGTT GGGTGTCAGC GCGGACGCCG TCTCCGTCTA CAAGCGTGGA | 6180 |
| GAGGGAAGAC AACTGGAAGT CTTCCAGTAT GAACACATCC TCTCTTTTGG GGCACCCCTG | 6240 |
| GCGAATACGT ATAAGATCGT GGTCGATGAG AGGGAGCTGC TCTTTGAAAC CAGTGAGGTG | 6300 |
| GTGGATGTGG CCAAGCTCAT GAAAGCCTAC ATCAGCATGA TCGTGAAGAA GCGCTACAGC | 6360 |
| ACGACACGCT CCGCCAGCAG CCAGGGCAGC TCCAGGTGAA GGCGGGACAG AGCCCACCTG | 6420 |
| TCTTTGCTAC CTGAACGCAC CACCCTCTGG CCTAGGCTGG CTCCAGTGTG CCATGCCCAG | 6480 |
| CCAAAACAAA CACAGAGCTG CCCAGGCTTT CTGGAAGCTT CTGGTCTGAG GGAGGTGTCT | 6540 |
| CCGAGGATCC TTTTGCCTGC CGCCTTCATT GATCCTGTAT TAAGCTGTCA ACTTTAACAG | 6600 |
| TCTGCACAGT TTCCAAAGCT TTACTACTCT TAGAGGACAC ATGCCTTAAA AAAGGAGGGG | 6660 |
| AGGAACCACG CTGCCACCAA AGCAGCCGGA AGTGCCTTAA CTTGTGGAAC CAACACTAAT | 6720 |
| CGACCGTAAC TGTGCTACTG AAGGGAACTG CCTTTCCCCC TTCTGGGGGA GACTTAACAG | 6780 |
| AGCGTGGAAG GGGGGCATTC TCTGTCAATG ATGCACTAAC CTCCCAACCT GATTTCCCCG | 6840 |
| AATCTGAGGG AAGGTGAGGG AGTGGGAAGG GGGATGGAGA GCTCGAGGGG ACAGTGTGTT | 6900 |
| TGAGCTGGAG TGCTGCGGGC AGCCTTTCTC ATGGAATGAC ATGAATCAAC TTTTTTCTTT | 6960 |
| GTTTCATCTT TTAAGTGTAC GTGCTTGCCT GTTCGTGCAT GTGTTCATAA ACTCAACACT | 7020 |
| TTAATCATGG TTTCATGAGC ATTAAAAAGC AAAGGGAAAA AGGATGTGTA ATGGTGTACA | 7080 |
| CAGTCTGTAT ATTTTAATAA TGCAGAGCTA TAGTCTCAAT TGTTACTTTA TAAGGTGGTT | 7140 |
| TTATTAACAA ACCCAAATCC TGGATTTTCC TGTCTTTGCT GTATTTTGAA AAACACGTGT | 7200 |
| TGACTCCATT GTTTTACATG TAGCAAAGTC TGCCATCTGT GTCTGCTGTA TTATAAACAG | 7260 |
| ATAAGCAGCC TACAAGATAA CTGTATTTAT AAACCACTCT TCAACAGCTG GCTCCAGTGC | 7320 |
| TGGTTTTAGA ACAAGAATGA AGTCATTTTG GAGTCTTTCA TGTCTAAAAG ATTTAAGTTA | 7380 |
| AAAACAAAGT GTTACTTGGA AGGTTAGCTT CTATCATTCT GGATAGATTA CAGATATAAT | 7440 |
| AACCATGTTG ACTATGGGGG AGAGACGCTG CATTCCAGAA ACGTCTTAAC ACTTGAGTGA | 7500 |
| ATCTTCAAAG GACCCTGACA TTAAATGCTG AGGCTTTAAT ACACACATAT TTTATCCCAA | 7560 |
| GTTTATAATG GTGGTCTGAA CAAGGCACCT GTAAATAAAT CAGCATTTAT GACCAGAAGA | 7620 |
| AAAATAATCT GGTCTTGGAC TTTTTATTTT TATATGGAAA AGTTTTAAGG ACTTGGGCCA | 7680 |
| ACTAAGTCTA CCCACACGAA AAAAGAAATT TGCCTTGTCC CTTTGTGTAC AACCATGCAA | 7740 |
| AACTGTTTGT TGGCTCACAG AAGTTCTGAC AATAAAAGAT ACTAGCT | |

ACC3 DNA sequence
Gene name: calcitonin receptor-like (CALCRL)
Unigene number: Hs.152175
Probeset Accession #: L76380
Nucleic Acid Accession #: NM_005795
Coding sequence: 555-1940 (predicted start/stop codons underlined)

| | |
|---|---|
| GCACGAGGGA ACAACCTCTC TCTCTSCAGC AGAGAGTGTC ACCTCCTGCT TTAGGACCAT | 60 |
| CAAGCTCTGC TAACTGAATC TCATCCTAAT TGCAGGATCA CATTGCAAAG CTTTCACTCT | 120 |
| TTCCCACCTT GCTTGTGGGT AAATCTCTTC TGCGGAATCT CAGAAAGTAA AGTTCCATCC | 180 |
| TGAGAATATT TCACAAAGAA TTTCCTTAAG AGCTGGACTG GGTCTTGACC CCTGGAATTT | 240 |
| AAGAAATTCT TAAAGACAAT GTCAAATATG ATCCAAGAGA AAATGTGATT TGAGTCTGGA | 300 |
| GACAATTGTG CATATCGTCT AATAATAAAA ACCCATACTA GCCTATAGAA AACAATATTT | 360 |
| GAATAATAAA AACCCATACT AGCCTATAGA AAACAATATT TGAAAGATTG CTACCACTAA | 420 |
| AAAGAAAACT ACTACAACTT GACAAGACTG CTGCAAACTT CAATTGGTCA CCACAACTTG | 480 |
| ACAAGGTTGC TATAAAACAA GATTGCTACA ACTTCTAGTT TATGTTATAC AGCATATTTC | 540 |
| ATTTGGGCTT AATGATGGAG AAAAAGTGTA CCCTGTATTT TCTGGTTCTC TTGCCTTTTT | 600 |
| TTATGATTCT TGTTACAGCA GAATTAGAAG AGAGTCCTGA GGACTCAATT CAGTTGGGAG | 660 |
| TTACTAGAAA TAAAATCATG ACAGCTCAAT ATGAATGTTA CCAAAAGATT ATGCAAGACC | 720 |
| CCATTCAACA AGCAGAAGGC GTTTACTGCA ACAGAACCTG GGATGGATGG CTCTGCTGGA | 780 |
| ACGATGTTGC AGCAGGAACT GAATCAATGC AGCTCTGCCC TGATTACTTT CAGGACTTTG | 840 |
| ATCCATCAGA AAAAGTTACA AAGATCTGTG ACCAAGATGG AAACTGGTTT AGACATCCAG | 900 |
| CAAGCAACAG AACATGGACA AATTATACCC AGTGTAATGT TAACACCCAC GAGAAAGTGA | 960 |
| AGACTGCACT AAATTTGTTT TACCTGACCA TAATTGGACA CGGATTGTCT ATTGCATCAC | 1020 |
| TGCTTATCTC GCTTGGCATA TTCTTTTATT TCAAGAGCCT AAGTTGCCAA AGGATTACCT | 1080 |
| TACACAAAAA TCTGTTCTTC TCATTTGTTT GTAACTCTGT TGTAACAATC ATTCACCTCA | 1140 |
| CTGCAGTGGC CAACAACCAG GCCTTAGTAG CCACAAATCC TGTTAGTTGC AAAGTGTCCC | 1200 |
| AGTTCATTCA TCTTTACCTG ATGGGCTGTA ATTACTTTTG GATGCTCTGT GAAGGCATTT | 1260 |
| ACCTACACAC ACTCATTGTG GTGGCCGTGT TTGCAGAGAA GCAACATTTA ATGTGGTATT | 1320 |
| ATTTTCTTGG CTGGGGATTT CCACTGATTC CTGCTTGTAT ACATGCCATT GCTAGAAGCT | 1380 |
| TATATTACAA TGACAATTGC TGGATCAGTT CTGATACCCA TCTCCTCTAC ATTATCCATG | 1440 |
| GCCCAATTTG TGCTGCTTTA CTGGTGAATC TTTTTTTCTT GTTAAATATT GTACGCGTTC | 1500 |
| TCATCACCAA GTTAAAAGTT ACACACCAAG CGGAATCCAA TCTGTACATG AAAGCTGTGA | 1560 |
| GAGCTACTCT TATCTTGGTG CCATTGCTTG GCATTGAATT TGTGCTGATT CCATGGCGAC | 1620 |
| CTGAAGGAAA GATTGCAGAG GAGGTATATG ACTACATCAT GCACATCCTT ATGCACTTCC | 1680 |
| AGGGTCTTTT GGTCTCTACC ATTTTCTGCT TCTTTAATGG AGAGGTTCAA GCAATTCTGA | 1740 |
| GAAGAAACTG GAATCAATAC AAAATCCAAT TTGGAAACAG CTTTTCCAAC TCAGAAGCTC | 1800 |
| TTCGTAGTGC GTCTTACACA GTGTCAACAA TCAGTGATGG TCCAGGTTAT AGTCATGACT | 1860 |
| GTCCTAGTGA ACACTTAAAT GGAAAAAGCA TCCATGATAT TGAAAATGTT CTCTTAAAAC | 1920 |
| CAGAAAATTT ATATAATTGA AAATAGAAGG ATGGTTGTCT CACTGTTTGG TGCTTCTCCT | 1980 |
| AACTCAAGGA CTTGGACCCA TGACTCTGTA GCCAGAAGAC TTCAATATTA AATGACTTTG | 2040 |
| GGGAATGTCA TAAAGAAGAG CCTTCACATG AAATTAGTAG TGTGTTGATA AGAGTGTAAC | 2100 |
| ATCCAGCTCT ATGTGGGAAA AAAGAAATCC TGGTTTGTAA TGTTTGTCAG TAAATACTCC | 2160 |
| CACTATGCCT GATGTGACGC TACTAACCTG ACATCACCAA GTGTGGAATT GGAGAAAAGC | 2220 |
| ACAATCAACT TTTCTGAGCT GGTGTAAGCC AGTTCCAGCA CACCATTGAT GAATTCAAAC | 2280 |
| AAATGGCTGT AAAACTAAAC ATACATGTTG GGCATGATTC TACCCTTATT CSCCCCAAGA | 2340 |
| GACCTAGCTA AGGTCTATAA ACATGAAGGG AAAATTAGCT TTTAGTTTTA AAACTCTTTA | 2400 |
| TCCCATCTTG ATTGGGGCAG TTGACTTTTT TTTTTTCCCA GAGTGCCGTA GTCCTTTTTG | 2460 |
| TAACTACCCT CTCAAATGGA CAATACCAGA AGTGAATTAT CCCTGCTGGC TTTCTTTTCT | 2520 |
| CTATGAAAAG CAACTGAGTA CAATTGTTAT GATCTACTCA TTTGCTGACA CATCAGTTAT | 2580 |
| ATCTTGTGGC ATATCCATTG TGGAAACTGG ATGAACAGGA TGTATAATAT GCAATCTTAC | 2640 |
| TTCTATATCA TTAGGAAAAC ATCTTAGTTG ATGCTACAAA ACACCTTGTC AACCTCTTCC | 2700 |
| TGTCTTACCA AACAGTGGGA GGGAATTCCT AGCTGTAAAT ATAAATTTTG CCCTTCCATT | 2760 |
| TCTACTGTAT AAACAAATTA GCAATCATTT TATATAAAGA AAATCAATGA AGGATTTCTT | 2820 |
| ATTTTCTTGG AATTTTGTAA AAAGAAATTG TGAAAAATGA GCTTGTAAAT ACTCCATTAT | 2880 |
| TTTATTTTAT AGTCTCAAAT CAAATACATA CAACCTATGT AATTTTTAAA GCAAATATAT | 2940 |
| AATGCAACAA TGTGTGTATG TTAATATCTG ATACTGTATC TGGGCTGATT TTTTAAATAA | 3000 |
| AATAGAGTCT GGAATGCT | |

ACC4 DNA sequence
Gene name: Homo sapiens mRNA; cDNA DKFZp586E1624
Unigene number: Hs.94030
Probeset Accession #: AA452000
Nucleic Acid Accession #: AL110152.1
Coding sequence: no ORF identified, possible frameshifts

| | |
|---|---|
| ACGCGTCCGA AGACATTAAG TAAAAAATTG GAACTATGAT TTTTCTTTGT CATTTTTTAA | 60 |
| AAAAGAATTA TTTTATTAAC CTGCTGGCAT ATAATCTGGA GTTCTTTTCA CAACCTTACT | 120 |
| TTTTCTGATT TGCTTTATTG AATGATTGAA TACTCATTTC TTTCTAAAAA TATGTTGTAA | 180 |
| ATTCTCCCTT GGCAAGATTT CTCCCTATGA GGGTAGTTAT TATTTGAGTC TGCCAAGTGG | 240 |
| TTACCATGGG GCAAGGTGCC ATGATGTATT CTTGGGTGCA TTGGTTTTTT GCGCATTGTA | 300 |
| AATTTAAGAC ACTTATAGTA AGTGGACTCA TTCATAGATG AGTTTCAGAA CCTTTTACGT | 360 |
| TCTCGGTAGA GGCTTCTGTC GGACAGGCAG AAGAGTGTAT TCCTCACTTT TTTTTTTGTC | 420 |
| TTCAAATTCC AGTAAGGCAT GCCACTTTTA AGAAATTAGA ATTTTTCTAT CATCTATGCA | 480 |
| AATGATATTT ATGTTAATAT TAAATATCTT ATGTTACACT GGGAGTAATT TGAGGTGCAA | 540 |
| TTATTTTTAT TACTACTTTG AATAGAGGAC CATTATCCTT CTTTCTTCAG AAAACTAAGA | 600 |
| AGTAAGTGTA ACTTTTAAAG TAAGTATATA TCAGTGAGAG TAGGCTTGTT TTACAACTAT | 660 |
| TTCTAGCCAG TGAGTTGTGT TTTCATGTCT CATCAAAAGA CAATACCACA TTGCATCATT | 720 |
| TTACAAAATA TGTTGTCATT TTCATTTCAG TTGTAACATA GGAAAATAGA TATTTCCTAG | 780 |
| ATGATTTCTG AGTTTCTTAC TGCAAAGAAC AGTTATAAAT TGGTATACAT GTGTCTCTGT | 840 |
| AATAGGGATA ATATTGATAT ATCTGTTGCT ACATATTTAA GAATCATTCT ATCTTATGTT | 900 |
| GTCTTGAGGC CAAGATTTAC CACGTTTGCC CAGTGTATTG AATTGGTGGT AGAAGGTAGT | 960 |
| TCCATGTTCC ATTTGTAGAT CTTTAAGATT TTATCTTTGA TAACTTTAAT AGAATGTGGC | 1020 |
| TCAGTTCTGG TCCTTCAAGC CTGTATGGTT TGGATTTTCA GTAGGGGACA GTTGATGTGG | 1080 |
| AGTCAATCTC TTTGGTACAC AGGAAGCTTT ATAAAATTTC ATTCACGAAT CTCTTATTTT | 1140 |
| GGGAAGCTGT TTTGCATATG AGAAGAACAC TGTTGAAATA AGGAACTAAA GCTTTATATA | 1200 |
| TTGATCAAGG TGATTCTGAA AGTTTTAATT TTTAATGTTG TAATGTTATG TTATTGTTAA | 1260 |
| TTGTACTTTA TTATGTATTC AATAGAAAAT CATGATTTAT TAATAAAAGC TTAAATTCTC | 1320 |
| ATCTAAAAAA AAAAAAAAAA A | |

ACC5 DNA sequence
Gene name: Selectin E (endothelial adhesion molecule 1)
Unigene number: Hs.89546
Probeset Accession #: M24736
Nucleic Acid Accession #: NM_000450
Coding sequence: 117-1949 (predicted start/stop codons underlined)

| | |
|---|---|
| CCTGAGACAG AGGCAGCAGT GATACCCACC TGAGAGATCC TGTGTTTGAA CAACTGCTTC | 60 |
| CCAAAACGGA AAGTATTTCA AGCCTAAACC TTTGGGTGAA AAGAACTCTT GAAGTCATGA | 120 |
| TTGCTTCACA GTTTCTCTCA GCTCTCACTT TGGTGCTTCT CATTAAAGAG AGTGGAGCCT | 180 |
| GGTCTTACAA CACCTCCACG GAAGCTATGA CTTATGATGA GGCCAGTGCT TATTGTCAGC | 240 |
| AAAGGTACAC ACACCTGGTT GCAATTCAAA ACAAAGAAGA GATTGAGTAC CTAAACTCCA | 300 |
| TATTGAGCTA TTCACCAAGT TATTACTGGA TTGGAATCAG AAAAGTCAAC AATGTGTGGG | 360 |
| TCTGGGTAGG AACCCAGAAA CCTCTGACAG AAGAAGCCAA GAACTGGGCT CCAGGTGAAC | 420 |
| CCAACAATAG GCAAAAAGAT GAGGACTGCG TGGAGATCTA CATCAAGAGA GAAAAAGATG | 480 |
| TGGGCATGTG GAATGATGAG AGGTGCAGCA AGAAGAAGCT TGCCCTATGC TACACAGCTG | 540 |
| CCTGTACCAA TACATCCTGC AGTGGCCACG GTGAATGTGT AGAGACCATC AATAATTACA | 600 |
| CTTGCAAGTG TGACCCTGGC TTCAGTGGAC TCAAGTGTGA GCAAATTGTG AACTGTACAG | 660 |
| CCCTGGAATC CCCTGAGCAT GGAAGCCTGG TTTGCAGTCA CCCACTGGGA AACTTCAGCT | 720 |
| ACAATTCTTC CTGCTCTATC AGCTGTGATA GGGGTTACCT GCCAAGCAGC ATGGAGACCA | 780 |
| TGCAGTGTAT GTCCTCTGGA GAATGGAGTG CTCCTATTCC AGCCTGCAAT GTGGTTGAGT | 840 |
| GTGATGCTGT GACAAATCCA GCCAATGGGT TCGTGGAATG TTTCCAAAAC CCTGGAAGCT | 900 |
| TCCCATGGAA CACAACCTGT ACATTTGACT GTGAAGAAGG ATTTGAACTA ATGGGAGCCC | 960 |
| AGAGCCTTCA GTGTACCTCA TCTGGGAATT GGGACAACGA GAAGCCAACG TGTAAAGCTG | 1020 |
| TGACATGCAG GGCCGTCCGC CAGCCTCAGA ATGGCTCTGT GAGGTGCAGC CATTCCCCTG | 1080 |
| CTGGAGAGTT CACCTTCAAA TCATCCTGCA ACTTCACCTG TGAGGAAGGC TTCATGTTGC | 1140 |
| AGGGACCAGC CCAGGTTGAA TGCACCACTC AAGGGCAGTG GACACAGCAA ATCCCAGTTT | 1200 |
| GTGAAGCTTT CCAGTGCACA GCCTTGTCCA ACCCCGAGCG AGGCTACATG AATTGTCTTC | 1260 |
| CTAGTGCTTC TGGCAGTTTC CGTTATGGGT CCAGCTGTGA GTTCTCCTGT GAGCAGGGTT | 1320 |
| TTGTGTTGAA GGGATCCAAA AGGCTCCAAT GTGGCCCCAC AGGGGAGTGG GACAACGAGA | 1380 |
| AGCCCACATG TGAAGCTGTG AGATGCGATG CTGTCCACCA GCCCCCGAAG GGTTTGGTGA | 1440 |
| GGTGTGCTCA TTCCCCTATT GGAGAATTCA CCTACAAGTC CTCTTGTGCC TTCAGCTGTG | 1500 |
| AGGAGGGATT TGAATTATAT GGATCAACTC AACTTGAGTG CACATCTCAG GGACAATGGA | 1560 |
| CAGAAGAGGT TCCTTCCTGC CAAGTGGTAA AATGTTCAAG CCTGGCAGTT CCGGGAAAGA | 1620 |
| TCAACATGAG CTGCAGTGGG GAGCCCGTGT TTGGCACTGT GTGCAAGTTC GCCTGTCCTG | 1680 |
| AAGGATGGAC GCTCAATGGC TCTGCAGCTC GGACATGTGG AGCCACAGGA CACTGGTCTG | 1740 |
| GCCTGCTACC TACCTGTGAA GCTCCCACTG AGTCCAACAT TCCCTTGGTA GCTGGACTTT | 1800 |
| CTGCTGCTGG ACTCTCCCTC CTGACATTAG CACCATTTCT CCTCTGGCTT CGGAAATGCT | 1860 |
| TACGGAAAGC AAAGAAATTT GTTCCTGCCA GCAGCTGCCA AAGCCTTGAA TCAGACGGAA | 1920 |
| GCTACCAAAA GCCTTCTTAC ATCCTTTAAG TTCAAAAGAA TCAGAAACAG GTGCATCTGG | 1980 |
| GGAACTAGAG GGATACACTG AAGTTAACAG AGACAGATAA CTCTCCTCGG GTCTCTGGCC | 2040 |
| CTTCTTGCCT ACTATGCCAG ATGCCTTTAT GGCTGAAACC GCAACACCCA TCACCACTTC | 2100 |
| AATAGATCAA AGTCCAGCAG GCAAGGACGG CCTTCAACTG AAAAGACTCA GTGTTCCCTT | 2160 |
| TCCTACTCTC AGGATCAAGA AAGTGTTGGC TAATGAAGGG AAAGGATATT TTCTTCCAAG | 2220 |
| CAAAGGTGAA GAGACCAAGA CTCTGAAATC TCAGAATTCC TTTTCTAACT CTCCCTTGCT | 2280 |
| CGCTGTAAAA TCTTGGCACA GAAACACAAT ATTTTGTGGC TTTCTTTCTT TTGCCCTTCA | 2340 |
| CAGTGTTTCG ACAGCTGATT ACACAGTTGC TGTCATAAGA ATGAATAATA ATTATCCAGA | 2400 |
| GTTTAGAGGA AAAAAATGAC TAAAAATATT ATAACTTAAA AAAATGACAG ATGTTGAATG | 2460 |
| CCCACAGGCA AATGCATGGA GGGTTGTTAA TGGTGCAAAT CCTACTGAAT GCTCTGTGCG | 2520 |
| AGGGTTACTA TGCACAATTT AATCACTTTC ATCCCTATGG GATTCAGTGC TTCTTAAAGA | 2580 |
| GTTCTTAAGG ATTGTGATAT TTTTACTTGC ATTGAATATA TTATAATCTT CCATACTTCT | 2640 |
| TCATTCAATA CAAGTGTGGT AGGGACTTAA AAAACTTGTA AATGCTGTCA ACTATGATAT | 2700 |
| GGTAAAAGTT ACTTATTCTA GATTACCCCC TCATTGTTTA TTAACAAATT ATGTTACATC | 2760 |
| TGTTTTAAAT TTATTTCAAA AAGGGAAACT ATTGTCCCCT AGCAAGGCAT GATGTTAACC | 2820 |
| AGAATAAAGT TCTGAGTGTT TTTACTACAG TTGTTTTTTG AAAACATGGT AGAATTGGAG | 2880 |
| AGTAAAAACT GAATGGAAGG TTTGTATATT GTCAGATATT TTTTCAGAAA TATGTGGTTT | 2940 |
| CCACGATGAA AAACTTCCAT GAGGCCAAAC GTTTTGAACT AATAAAAGCA TAAATGCAAA | 3000 |
| CACACAAAGG TATAATTTTA TGAATGTCTT TGTTGGAAAA GAATACAGAA AGATGGATGT | 3060 |
| GCTTTGCATT CCTACAAAGA TGTTTGTCAG ATGTGATATG TAAACATAAT TCTTGTATAT | 3120 |
| TATGGAAGAT TTTAAATTCA CAATAGAAAC TCACCATGTA AAAGAGTCAT CTGGTAGATT | 3180 |
| TTTAACGAAT GAAGATGTCT AATAGTTATT CCCTATTTGT TTTCTTCTGT ATGTTAGGGT | 3240 |
| GCTCTGGAAG AGAGGAATGC CTGTGTGAGC AAGCATTTAT GTTTATTTAT AAGCAGATTT | 3300 |
| AACAATTCCA AAGGAATCTC CAGTTTTCAG TTGATCACTG GCAATGAAAA ATTCTCAGTC | 3360 |
| AGTAATTGCC AAAGCTGCTC TAGCCTTGAG GAGTGTGAGA ATCAAAACTC TCCTACACTT | 3420 |
| CCATTAACTT AGCATGTGTT GAAAAAAAAA GTTTCAGAGA AGTTCTGGCT GAACACTGGC | 3480 |
| AACGACAAAG CCAACAGTCA AAACAGAGAT GTGATAAGGA TCAGAACAGC AGAGGTTCTT | 3540 |
| TTAAAGGGGC AGAAAAACTC TGGGAAATAA GAGAGAACAA CTACTGTGAT CAGGCTATGT | 3600 |
| ATGGAATACA GTGTTATTTT CTTTGAAATT GTTTAAGTGT TGTAAATATT TATGTAAACT | 3660 |
| GCATTAGAAA TTAGCTGTGT GAAATACCAG TGTGGTTTGT GTTTGAGTTT TATTGAGAAT | 3720 |
| TTTAAATTAT AACTTAAAAT ATTTTATAAT TTTTAAAGTA TATATTTATT TAAGCTTATG | 3780 |
| TCAGACCTAT TTGACATAAC ACTATAAAGG TTGACAATAA ATGTGCTTAT GTTT | |

ACC8 DNA sequence
Gene name: Chemokine (C-X-C motif), receptor 4 (fusin)
Unigene number: Hs.89414
Probeset Accession #: L06797
Nucleic Acid Accession #: NM_003467
Coding sequence: 89-1147 (predicted start/stop codons underlined)

| | |
|---|---|
| GTTTGTTGGC TGCGGCAGCA GGTAGCAAAG TGACGCCGAG GGCCTGAGTG CTCCAGTAGC | 60 |
| CACCGCATCT GGAGAACCAG CGGTTACCAT GGAGGGGATC AGTATATACA CTTCAGATAA | 120 |
| CTACACCGAG GAAATGGGCT CAGGGGACTA TGACTCCATG AAGGAACCCT GTTTCCGTGA | 180 |
| AGAAAATGCT AATTTCAATA AAATCTTCCT GCCCACCATC TACTCCATCA TCTTCTTAAC | 240 |
| TGGCATTGTG GGCAATGGAT TGGTCATCCT GGTCATGGGT TACCAGAAGA AACTGAGAAG | 300 |
| CATGACGGAC AAGTACAGGC TGCACCTGTC AGTGGCCGAC CTCCTCTTTG TCATCACGCT | 360 |
| TCCCTTCTGG GCAGTTGATG CCGTGGCAAA CTGGTACTTT GGGAACTTCC TATGCAAGGC | 420 |
| AGTCCATGTC ATCTACACAG TCAACCTCTA CAGCAGTGTC CTCATCCTGG CCTTCATCAG | 480 |
| TCTGGACCGC TACCTGGCCA TCGTCCACGC CACCAACAGT CAGAGGCCAA GGAAGCTGTT | 540 |
| GGCTGAAAAG GTGGTCTATG TTGGCGTCTG GATCCCTGCC CTCCTGCTGA CTATTCCCGA | 600 |
| CTTCATCTTT GCCAACGTCA GTGAGGCAGA TGACAGATAT ATCTGTGACC GCTTCTACCC | 660 |
| CAATGACTTG TGGGTGGTTG TGTTCCAGTT TCAGCACATC ATGGTTGGCC TTATCCTGCC | 720 |
| TGGTATTGTC ATCCTGTCCT GCTATTGCAT TATCATCTCC AAGCTGTCAC ACTCCAAGGG | 780 |
| CCACCAGAAG CGCAAGGCCC TCAAGACCAC AGTCATCCTC ATCCTGGCTT TCTTCGCCTG | 840 |
| TTGGCTGCCT TACTACATTG GGATCAGCAT CGACTCCTTC ATCCTCCTGG AAATCATCAA | 900 |
| GCAAGGGTGT GAGTTTGAGA ACACTGTGCA CAAGTGGATT TCCATCACCG AGGCCCTAGC | 960 |
| TTTCTTCCAC TGTTGTCTGA ACCCCATCCT CTATGCTTTC CTTGGAGCCA AATTTAAAAC | 1020 |
| CTCTGCCCAG CACGCACTCA CCTCTGTGAG CAGAGGGTCC AGCCTCAAGA TCCTCTCCAA | 1080 |
| AGGAAAGCGA GGTGGACATT CATCTGTTTC CACTGAGTCT GAGTCTTCAA GTTTTCACTC | 1140 |
| CAGCTAACAC AGATGTAAAA GACTTTTTTT TATACGATAA ATAACTTTTT TTTAAGTTAC | 1200 |
| ACATTTTTCA GATATAAAAG ACTGACCAAT ATTGTACAGT TTTTATTGCT TGTTGGATTT | 1260 |
| TTGTCTTGTG TTTCTTTAGT TTTTGTGAAG TTTAATTGAC TTATTTATAT AAATTTTTTT | 1320 |
| TGTTTCATAT TGATGTGTGT CTAGGCAGGA CCTGTGGCCA AGTTCTTAGT TGCTGTATGT | 1380 |
| CTCGTGGTAG GACTGTAGAA AAGGGAACTG AACATTCCAG AGCGTGTAGT GAATCACGTA | 1440 |
| AAGCTAGAAA TGATCCCCAG CTGTTTATGC ATAGATAATC TCTCCATTCC CGTGGAACGT | 1500 |
| TTTTCCTGTT CTTAAGACGT GATTTTGCTG TAGAAGATGG CACTTATAAC CAAAGCCCAA | 1560 |
| AGTGGTATAG AAATGCTGGT TTTTCAGTTT TCAGGAGTGG GTTGATTTCA GCACCTACAG | 1620 |
| TGTACAGTCT TGTATTAAGT TGTTAATAAA AGTACATGTT AAACTTACTT AGTGTTATG | |

ACF2 DNA sequence
Gene name: Endothelial cell-specific molecule 1
Unigene number: Hs.41716
Probeset Accession #: X89426
Nucleic Acid Accession #: NM_007036
Coding sequence: 56-610 (predicted start/stop codons underlined)

| | |
|---|---|
| CTTCCCACCA GCAAAGACCA CGACTGGAGA GCCGAGCCGG AGGCAGCTGG GAAACATGAA | 60 |
| GAGCGTCTTG CTGCTGACCA CGCTCCTCGT GCCTGCACAC CTGGTGGCCG CCTGGAGCAA | 120 |
| TAATTATGCG GTGGACTGCC CTCAACACTG TGACAGCAGT GAGTGCAAAA GCAGCCCGCG | 180 |
| CTGCAAGAGG ACAGTGCTCG ACGACTGTGG CTGCTGCCGA GTGTGCGCTG CAGGGCGGGG | 240 |
| AGAAACTTGC TACCGCACAG TCTCAGGCAT GGATGGCATG AAGTGTGGCC CGGGGCTGAG | 300 |
| GTGTCAGCCT TCTAATGGGG AGGATCCTTT TGGTGAAGAG TTTGGTATCT GCAAAGACTG | 360 |
| TCCCTACGGC ACCTTCGGGA TGGATTGCAG AGAGACCTGC AACTGCCAGT CAGGCATCTG | 420 |
| TGACAGGGGG ACGGGAAAAT GCCTGAAATT CCCCTTCTTC CAATATTCAG TAACCAAGTC | 480 |
| TTCCAACAGA TTTGTTTCTC TCACGGAGCA TGACATGGCA TCTGGAGATG GCAATATTGT | 540 |
| GAGAGAAGAA GTTGTGAAAG AGAATGCTGC CGGGTCTCCC GTAATGAGGA AATGGTTAAA | 600 |
| TCCACGCTGA TCCCGGCTGT GATTTCTGAG AGAAGGCTCT ATTTTCGTGA TTGTTCAACA | 660 |
| CACAGCCAAC ATTTTAGGAA CTTTCTAGAT ATAGCATAAG TACATGTAAT TTTTGAAGAT | 720 |
| CCAAATTGTG ATGCATGGTG GATCCAGAAA ACAAAAAGTA GGATACTTAC AATCCATAAC | 780 |
| ATCCATATGA CTGAACACTT GTATGTGTTT GTTAAATATT CGAATGCATG TAGATTTGTT | 840 |
| AAATGTGTGT GTATAGTAAC ACTGAAGAAC TAAAAATGCA ATTTAGGTAA TCTTACATGG | 900 |
| AGACAGGTCA ACCAAAGAGG GAGCTAGGCA AAGCTGAAGA CCGCAGTGAG TCAAATTAGT | 960 |
| TCTTTGACTT TGATGTACAT TAATGTTGGG ATATGGAATG AAGACTTAAG AGCAGGAGAA | 1020 |
| GATGGGGAGG GGGTGGGAGT GGGAAATAAA ATATTTAGCC CTTCCTTGGT AGGTAGCTTC | 1080 |
| TCTAGAATTT AATTGTGCTT TTTTTTTTTT TTTGGCTTTG GGAAAAGTCA AAATAAAACA | 1140 |
| ACCAGAAAAC CCCTGAAGGA AGTAAGATGT TTGAAGCTTA TGGAAATTTG AGTAACAAAC | 1200 |
| AGCTTTGAAC TGAGAGCAAT TTCAAAAGGC TGCTGATGTA GTTCCCGGGT TACCTGTATC | 1260 |
| TGAAGGACGG TTCTGGGGCA TAGGAAACAC ATACACTTCC ATAAATAGCT TTAACGTATG | 1320 |
| CCACCTCAGA GATAAATCTA AGAAGTATTT TACCCACTGG TGGTTTGTGT GTGTATGAAG | 1380 |
| GTAAATATTT ATATATTTTT ATAAATAAAT GTGTTAGTGC AAGTCATCTT CCCTACCCAT | 1440 |
| ATTTATCATC CTCTTGAGGA AAGAAATCTA GTATTATTTG TTGAAAATGG TTAGAATAAA | 1500 |
| AACCTATGAC TCTATAAGGT TTTCAAACAT CTGAGGCATG ATAAATTTAT TATCCATAAT | 1560 |
| TATAGGAGTC ACTCTGGATT TCAAAAAATG TCAAAAAATG AGCAACAGAG GGACCTTATT | 1620 |
| TAAACATAAG TGCTGTGACT TCGGTGAATT TTCAATTTAA GGTATGAAAA TAAGTTTTTA | 1680 |
| GGAGGTTTGT AAAAGAAGAA TCAATTTTCA GCAGAAAACA TGTCAACTTT AAAATATAGG | 1740 |
| TGGAATTAGG AGTATATTTG AAAGAATCTT AGCACAAACA GGACTGTTGT ACTAGATGTT | 1800 |
| CTTAGGAAAT ATCTCAGAAG TATTTTATTT GAAGTGAAGA ACTTATTTAA GAATTATTTC | 1860 |
| AGTATTTACC TGTATTTTAT TCTTGAAGTT GGCCAACAGA GTTGTGAATG TGTGTGGAAG | 1920 |
| GCCTTTGAAT GTAAAGCTGC ATAAGCTGTT AGGTTTTGTT TTAAAAGGAC ATGTTTATTA | 1980 |
| TTGTTCAATA AAAAAGAACA AGATAC | |

ACF4 DNA sequence
Gene name: P53-responsive gene 2 similar to D.melanogaster peroxidasin (U11052)
Unigene number: Hs.118893
Probeset Accession #: D86983
Nucleic Acid Accession #: D86983
Coding sequence: 1-4491 (predicted stop codon underlined, sequence is open at 5′
end)

| | |
|---|---|
| AGCCGGCCGT GGTGGCTCCG TGCGTCCGAG CGTCCGTCCG CGCCGTCGGC CATGGCCAAG | 60 |
| CGCTCCAGGG GCCCCGGGCG CCGCTGCCTG TTGGCGCTCG TGCTGTTCTG CGCCTGGGGG | 120 |
| ACGCTGGCCG TGGTGGCCCA GAAGCCGGGC GCAGGGTGTC CGAGCCGCTG CCTGTGCTTC | 180 |
| CGCACCACCG TGCGCTGCAT GCATCTGCTG CTGGAGGCCG TGCCCGCCGT GGCGCCGCAG | 240 |
| ACCTCCATCC TAGATCTTCG CTTTAACAGA ATCAGAGAGA TCCAACCTGG GGCATTCAGG | 300 |
| CGGCTGAGGA ACTTGAACAC ATTGCTTCTC AATAATAATC AGATCAAGAG GATACCTAGT | 360 |
| GGAGCATTTG AAGACTTGGA AAATTTAAAA TATCTCTATC TGTACAAGAA TGAGATCCAG | 420 |
| TCAATTGACA GGCAAGCATT TAAGGGACTT GCCTCTCTAG AGCAACTATA CCTGCACTTT | 480 |
| AATCAGATAG AAACTTTGGA CCCAGATTCG TTCCAGCATC TCCCGAAGCT CGAGAGGCTA | 540 |
| TTTTTGCATA ACAACCGGAT TACACATTTA GTTCCAGGGA CATTTAATCA CTTGGAATCT | 600 |
| ATGAAGAGAT TGCGACTGGA CTCAAACACA CTTCACTGCG ACTGTGAAAT CCTGTGGTTG | 660 |
| GCGGATTTGC TGAAAACCTA CGCGGAGTCG GGGAACGCGC AGGCAGCGGC CATCTGTGAA | 720 |
| TATCCCAGAC GCATCCAGGG ACGCTCAGTG GCAACCATCA CCCCGGAAGA GCTGAACTGT | 780 |
| GAAAGGCCCC GGATCACCTC CGAGCCCCAG GACGCAGATG TGACCTCGGG GAACACCGTG | 840 |
| TACTTCACCT GCAGAGCCGA AGGCAACCCC AAGCCTGAGA TCATCTGGCT GCGAAACAAT | 900 |
| AATGAGCTGA GCATGAAGAC AGATTCCCGC CTAAACTTGC TGGACGATGG GACCCTGATG | 960 |
| ATCCAGAACA CACAGGAGAC AGACCAGGGT ATCTACCAGT GCATGGCAAA GAACGTGGCC | 1020 |
| GGAGAGGTGA AGACGCAAGA GGTGACCCTC AGGTACTTCG GGTCTCCAGC TCGACCCACT | 1080 |
| TTTGTAATCC AGCCACAGAA TACAGAGGTG CTGGTTGGGG AGAGCGTCAC GCTGGAGTGC | 1140 |
| AGCGCCACAG GCCACCCCCC GCCGCGGATC TCCTGGACGA GAGGTGACCG CACACCCTTG | 1200 |
| CCAGTTGACC CGCGGGTGAA CATCACGCCT TCTGGCGGGC TTTACATACA GAACGTCGTA | 1260 |
| CAGGGGGACA GCGGAGAGTA TGCGTGCTCT GCGACCAACA ACATTGACAG CGTCCATGCC | 1320 |
| ACCGCTTTCA TCATCGTCCA GGCTCTTCCT CAGTTCACTG TGACGCCTCA GGACAGAGTC | 1380 |
| GTTATTGAGG GCCAGACCGT GGATTTCCAG TGTGAAGCCA AGGGCAACCC GCCGCCCGTC | 1440 |
| ATCGCCTCCA CCAAGGGAGG GAGCCAGCTC TCCGTGGACC GGCGGCACCT GGTCCTGTCA | 1500 |
| TCGGGAACC TTAGAATCTC TGGTGTTGCC CTCCACGACC AGGGCCAGTA CGAATGCCAG | 1560 |
| GCTGTCAACA TCATCGGCTC CCAGAAGGTC GTGGCCCACC TGACTGTGCA GCCCAGAGTC | 1620 |
| ACCCCAGTGT TTGCCAGCAT TCCCAGCGAC ACAACAGTGG AGGTGGGCGC CAATGTGCAG | 1680 |
| CTCCCGTGCA GCTCCCAGGG CGAGCCCGAG CCAGCCATCA CCTGGAACAA GGATGGGGTT | 1740 |
| CAGGTGACAG AAAGTGGAAA ATTTCACATC AGCCCTGAAG GATTCTTGAC CATCAATGAC | 1800 |
| GTTGGCCCTG CAGACGCAGG TCGCTATGAG TGTGTGGCCC GGAACACCAT TGGGTCGGCC | 1860 |
| TCGGTGAGCA TGGTGCTCAG TGTGAACGTT CCTGACGTCA GTCGAAATGG AGATCCGTTT | 1920 |
| GTAGCTACCT CCATCGTGGA AGCGATTGCG ACTGTTGACA GAGCTATAAA CTCAACCCGA | 1980 |
| ACACATTTGT TTGACAGCCG TCCTCGTTCT CCAAATGATT TGCTGGCCTT GTTCCGGTAT | 2040 |
| CCGAGGGATC CTTACACAGT TGAACAGGCA CGGGCGGGAG AAATCTTTGA ACGGACATTG | 2100 |
| CAGCTCATTC AGGAGCATGT ACAGCATGGC TTGATGGTCG ACCTCAACGG AACAAGTTAC | 2160 |
| CACTACAACG ACCTGGTGTC TCCACAGTAC CTGAACCTCA TCGCAAACCT GTCGGGCTGT | 2220 |
| ACCGCCCACC GGCGCGTGAA CAACTGCTCG GACATGTGCT TCCACCAGAA GTACCGGACG | 2280 |
| CACGACGGCA CCTGTAACAA CCTGCAGCAC CCCATGTGGG GCGCCTCGCT GACCGCCTTC | 2340 |
| GAGCGCCTGC TGAAATCCGT GTACGAGAAT GGCTTCAACA CCCCTCGGGG CATCAACCCC | 2400 |
| CACCGACTGT ACAACGGGCA CGCCCTTCCC ATGCCGCGCC TGGTGTCCAC CACCCTGATC | 2460 |
| GGGACGGAGA CCGTCACACC CGACGAGCAG TTCACCCACA TGCTGATGCA GTGGGGCCAG | 2520 |
| TTCCTGGACC ACGACCTCGA CTCCACGGTG GTGGCCCTGA GCCAGGCACG CTTCTCCGAC | 2580 |
| GGACAGCACT GCAGCAACGT GTGCAGCAAC GACCCCCCCT GCTTCTCTGT CATGATCCCC | 2640 |
| CCCAATGACT CCCGGGCCAG GAGCGGGGCC CGCTGCATGT TCTTCGTGCG CTCCAGCCCT | 2700 |
| GTGTGCGGCA GCGGCATGAC TTCGCTGCTC ATGAACTCCG TGTACCCGCG GGAGCAGATC | 2760 |
| AACCAGCTCA CCTCCTACAT CGACGCATCC AACGTGTACG GGAGCACGGA GCATGAGGCC | 2820 |
| CGCAGCATCC GCGACCTGGC CAGCCACCGC GGCCTGCTGC GGCAGGGCAT CGTGCAGCGG | 2880 |
| TCCGGGAAGC CGCTGCTCCC CTTCGCCACC GGGCCGCCCA CGGAGTGCAT GCGGGACGAG | 2940 |
| AACGAGAGCC CCATCCCCTG CTTCCTGGCC GGGGACCACC GCGCCAACGA GCAGCTGGGC | 3000 |
| CTGACCAGCA TGCACACGCT GTGGTTCCGC GAGCACAACC GCATTGCCAC GGAGCTGCTC | 3060 |
| AAGCTGAACC CGCACTGGGA CGGCGACACC ATCTACTATG AGACCAGGAA GATCGTGGGT | 3120 |
| GCGGAGATCC AGCACATCAC CTACCAGCAC TGGCTCCCGA AGATCCTGGG GGAGGTGGGC | 3180 |
| ATGAGGACGC TGGGAGAGTA CCACGGCTAC GACCCCGGCA TCAATGCTGG CATCTTCAAC | 3240 |
| GCCTTCGCCA CCGCGGCCTT CAGGTTTGGC CACACGCTTG TCAACCCACT GCTTTACCGG | 3300 |
| CTGGACGAGA ACTTCCAGCC CATTGCACAA GATCACCTCC CCCTTCACAA AGCTTTCTTC | 3360 |
| TCTCCCTTCC GGATTGTGAA TGAGGGCGGC ATCGATCCGC TTCTCAGGGG GCTGTTCGGG | 3420 |
| GTGGCGGGGA AAATGCGTGT GCCCTCGCAG CTGCTGAACA CGGAGCTCAC GGAGCGGCTG | 3480 |
| TTCTCCATGG CACACACGGT GGCTCTGGAC CTGGCGGCCA TCAACATCCA GCGGGGCCGG | 3540 |
| GACCAGGGGA TCCCACCCTA CCACGACTAC AGGGTCTACT GCAATCTATC GGCGGCACAC | 3600 |
| ACGTTCGAGG ACCTGAAAAA TGAGATTAAA AACCCTGAGA TCCGGGAGAA ACTGAAAAGG | 3660 |
| TTGTATGGCT CGACACTCAA CATCGACCTG TTTCCGGCGC TCGTGGTGGA GGACCTGGTG | 3720 |
| CCTGGCAGCC GGCTGGGCCC CACCCTGATG TGTCTTCTCA GCACACAGTT CAAGCGCCTG | 3780 |
| CGAGATGGGG ACAGGTTGTG GTATGAGAAC CCTGGGGTGT TCTCCCCGGC CCAGCTGACT | 3840 |
| CAGATCAAGC AGACGTCGCT GGCCAGGATC CTATGCGACA ACGCGGACAA CATCACCCGG | 3900 |
| GTGCAGAGCG ACGTGTTCAG GGTGGCGGAG TTCCCTCACG GCTACGGCAG CTGTGACGAG | 3960 |
| ATCCCCAGGG TGGACCTCCG GGTGTGGCAG GACTGCTGTG AAGACTGTAG GACCAGGGGG | 4020 |
| CAGTTCAATG CCTTTTCCTA TCATTTCCGA GGCAGACGGT CTCTTGAGTT CAGCTACCAG | 4080 |
| GAGGACAAGC CGACCAAGAA AACAAGACCA CGGAAAATAC CCAGTGTTGG GAGACAGGGG | 4140 |
| GAACATCTCA GCAACAGCAC CTCAGCCTTC AGCACACGCT CAGATGCATC TGGGACAAAT | 4200 |
| GACTTCAGAG AGTTTGTTCT GGAAATGCAG AAGACCATCA CAGACCTCAG AACACAGATA | 4260 |
| AAGAAACTTG AATCACGGCT CAGTACCACA GAGTGCGTGG ATGCCGGGGG CGAATCTCAC | 4320 |
| GCCAACAACA CCAAGTGGAA AAAAGATGCA TGCACCATTT GTGAATGCAA AGACGGGCAG | 4380 |
| GTCACCTGCT TCGTGGAAGC TTGCCCCCCT GCCACCTGTG CTGTCCCCGT GAACATCCCA | 4440 |
| GGGGCCTGCT GTCCAGTCTG CTTACAGAAG AGGGCGGAGG AAAAGCCCTA GGCTCCTGGG | 4500 |
| AGGCTCCTCA GAGTTTGTCT GCTGTGCCAT CGTGAGATCG GGTGGCCGAT GGCAGGGAGC | 4560 |
| TGCGGACTGC AGACCAGGAA ACACCCAGAA CTCGTGACAT TTCATGACAA CGTCCAGCTG | 4620 |
| GTGCTGTTAC AGAAGGCAGT GCAGGAGGCT TCCAACCAGA GCATCTGCGG AGAAGGAGGC | 4680 |
| ACAGCAGGTG CCTGAAGGGA AGCAGGCAGG AGTCCTAGCT TCACGTTAGA CTTCTCAGGT | 4740 |
| TTTTATTTAA TTCTTTTAAA ATGAAAAATT GGTGCTACTA TTAAATTGCA CAGTTGAATC | 4800 |
| ATTTAGGCGC CTAAATTGGT TTTGCCTCCC AACACCATTT CTTTTTAAAT AAAGCAGGAT | 4860 |
| ACCTCTATAT GTCAGCCTTG CCTTGTTCAG ATGCCAGGAG CCGGCAGACC TGTCACCCGC | 4920 |
| AGGTGGGGTG AGTCTCGGAG CTGCCAGAGG GGCTCACCGA AATCGGGGTT CCATCACAAG | 4980 |
| CTATGTTTAA AAAGAAAATT GGTGTTTGGC AAACGGAACA GAACCTTTGA TGAGAGCGTT | 5040 |
| CACAGGGACA CTGTCTGGGG GTGCAGTGCA AGCCCCCGGC CTCTTCCCTG GGAACCTCTG | 5100 |
| AACTCCTCCT TCCTCTGGGC TCTCTGTAAC ATTTCACCAC ACGTCAGCAT CTAATCCCAA | 5160 |
| GACAAACATT CCCGCTGCTC GAAGCAGCTG TATAGCCTGT GACTCTCCGT GTGTCAGCTC | 5220 |
| CTTCCACACC TGATTAGAAC ATTCATAAGC CACATTTAGA AACAGATTTG CTTTCAGCTG | 5280 |
| TCACTTGCAC ACATACTGCC TAGTTGTGAA CCAAATGTGA AAAAACCTCC TTCATCCCAT | 5340 |
| TGTGTATCTG ATACCTGCCG AGGGCCAAGG GTGTGTGTTG ACAACGCCGC TCCCAGCCGG | 5400 |
| CCCTGGTTGC GTCCACGTCC TGAACAAGAG CCGCTTCCGG ATGGCTCTTC CCAAGGGAGG | 5460 |
| AGGAGCTCAA GTGTCGGGAA CTGTCTAACT TCAGGTTGTG TGAGTGCGTT | |

ACF5 DNA sequence
Gene name: Mitogen-activated protein kinase kinase kinase kinase 4
Unigene number: Hs.3628
Probeset Accession #: N54067
Nucleic Acid Accession #: NM_004834
Coding sequence: 80-3577 (predicted start/stop codons underlined)

| | |
|---|---|
| AATTCGAGGA TCCGGGTACC ATGGCACAGA GCGACAGAGA CATTTATTGT TATTTGTTTT | 60 |
| TTGGTGGCAA AAAGGGAAAA TGGCGAACGA CTCCCCTGCA AAAAGTCTGG TGGACATCGA | 120 |
| CCTCTCCTCC CTGCGGGATC CTGCTGGGAT TTTTGAGCTG GTGGAAGTGG TTGGAAATGG | 180 |
| CACCTATGGA CAAGTCTATA AGGGTCGACA TGTTAAAACG GGTCAGTTGG CAGCCATCAA | 240 |
| AGTTATGGAT GTCACTGAGG ATGAAGAGGA AGAAATCAAA CTGGAGATAA ATATGCTAAA | 300 |
| GAAATACTCT CATCACAGAA ACATTGCAAC ATATTATGGT GCTTTCATCA AAAAGAGCCC | 360 |
| TCCAGGACAT GATGACCAAC TCTGGCTTGT TATGGAGTTC TGTGGGGCTG GGTCCATTAC | 420 |
| AGACCTTGTG AAGAACACCA AAGGGAACAC ACTCAAAGAA GACTGGATCG CTTACATCTC | 480 |
| CAGAGAAATC CTGAGGGGAC TGGCACATCT TCACATTCAT CATGTGATTC ACCGGGATAT | 540 |
| CAAGGGCCAG AATGTGTTGC TGACTGAGAA TGCAGAGGTG AAACTTGTTG ACTTTGGTGT | 600 |
| GAGTGCTCAG CTGGACAGGA CTGTGGGGCG GAGAAATACG TTCATAGGCA CTCCCTACTG | 660 |
| GATGGCTCCT GAGGTCATCG CCTGTGATGA GAACCCAGAT GCCACCTATG ATTACAGAAG | 720 |
| TGATCTTTGG TCTTGTGGCA TTACAGCCAT TGAGATGGCA GAAGGTGCTC CCCCTCTCTG | 780 |
| TGACATGCAT CCAATGAGAG CACTGTTTCT CATTCCCAGA AACCCTCCTC CCCGGCTGAA | 840 |
| GTCAAAAAAA TGGTCGAAGA AGTTTTTTAG TTTTATAGAA GGGTGCCTGG TGAAGAATTA | 900 |
| CATGCAGCGG CCCTCTACAG AGCAGCTTTT GAAACATCCT TTTATAAGGG ATCAGCCAAA | 960 |
| TGAAAGGCAA GTTAGAATCC AGCTTAAGGA TCATATAGAT CGTACCAGGA AGAAGAGAGG | 1020 |
| CGAGAAAGAT GAAACTGAGT ATGAGTACAG TGGGAGTGAG GAAGAAGAGG AGGAAGTGCC | 1080 |
| TGAACAGGAA GGAGAGCCAA GTTCCATTGT GAACGTGCCT GGTGAGTCTA CTCTTCGCCG | 1140 |
| AGATTTCCTG AGACTGCAGC AGGAGAACAA GGAACGTTCC GAGGCTCTTC GGAGACAACA | 1200 |
| GTTACTACAG GAGCAACAGC TCCGGGAGCA GGAAGAATAT AAAAGGCAAC TGCTGGCAGA | 1260 |
| GAGACAGAAG CGGATTGAGC AGCAGAAAGA ACAGAGGCGA CGGCTAGAAG AGCAACAAAG | 1320 |
| GAGAGAGCGG GAGGCTAGAA GGCAGCAGGA ACGTGAACAG CGAAGGAGAG AACAAGAAGA | 1380 |
| AAAGAGGCGT CTAGAGGAGT TGGAGAGAAG GCGCAAAGAA GAAGAGGAGA GGAGACGGGC | 1440 |
| AGAAGAAGAA AAGAGGAGAG TTGAAAGAGA ACAGGAGTAT ATCAGGCGAC AGCTAGAAGA | 1500 |
| GGAGCAGCGG CACTTGGAAG TCCTTCAGCA GCAGCTGCTC CAGGAGCAGG CCATGTTACT | 1560 |
| GCATGACCAT AGGAGGCCGC ACCCGCAGCA CTCGCAGCAG CCGCCACCAC CGCAGCAGGA | 1620 |
| AAGGAGCAAG CCAAGCTTCC ATGCTCCCGA GCCCAAAGCC CACTACGAGC CTGCTGACCG | 1680 |
| AGCGCGAGAG GTTCCTGTGA GAACAACATC TCGCTCCCCT GTTCTGTCCC GTCGAGATTC | 1740 |
| CCCACTGCAG GGCAGTGGGC AGCAGAATAG CCAGGCAGGA CAGAGAAACT CCACCAGTAT | 1800 |
| TGAGCCCAGG CTTCTGTGGG AGAGAGTGGA GAAGCTGGTG CCCAGACCTG GCAGTGGCAG | 1860 |
| CTCCTCAGGG TCCAGCAACT CAGGATCCCA GCCCGGGTCT CACCCTGGGT CTCAGAGTGG | 1920 |
| CTCCGGGGAA CGCTTCAGAG TGAGATCATC ATCCAAGTCT GAAGGCTCTC CATCTCAGCG | 1980 |
| CCTGGAAAAT GCAGTGAAAA AACCTGAAGA TAAAAAGGAA GTTTTCAGAC CCCTCAAGCC | 2040 |
| TGCTGGCGAA GTGGATCTGA CCGCACTGGC CAAAGAGCTT CGAGCAGTGG AAGATGTACG | 2100 |
| GCCACCTCAC AAAGTAACGG ACTACTCCTC ATCCAGTGAG GAGTCGGGGA CGACGGATGA | 2160 |
| GGAGGACGAC GATGTGGAGC AGGAAGGGGC TGACGAGTCC ACCTCAGGAC CAGAGGACAC | 2220 |
| CAGAGCAGCG TCATCTCTGA ATTTGAGCAA TGGTGAAACG GAATCTGTGA AAACCATGAT | 2280 |
| TGTCCATGAT GATGTAGAAA GTGAGCCGGC CATGACCCCA TCCAAGGAGG GCACTCTAAT | 2340 |
| CGTCCGCCAG ACTCAGTCCG CTAGTAGCAC ACTCCAGAAA CACAAATCTT CCTCCTCCTT | 2400 |
| TACACCTTTT ATAGACCCCA GATTACTACA GATTTCTCCA TCTAGCGGAA CAACAGTGAC | 2460 |
| ATCTGTGGTG GGATTTTCCT GTGATGGGAT GAGACCAGAA GCCATAAGGC AAGATCCTAC | 2520 |
| CCGGAAAGGC TCAGTGGTCA ATGTGAATCC TACCAACACT AGGCCACAGA GTGACACCCC | 2580 |
| GGAGATTCGT AAATACAAGA AGAGGTTTAA CTCTGAGATT CTGTGTGCTG CCTTATGGGG | 2640 |
| AGTGAATTTG CTAGTGGGTA CAGAGAGTGG CCTGATGCTG CTGGACAGAA GTGGCCAAGG | 2700 |
| GAAGGTCTAT CCTCTTATCA ACCGAAGACG ATTTCAACAA ATGGACGTAC TTGAGGGCTT | 2760 |
| GAATGTCTTG GTGACAATAT CTGGCAAAAA GGATAAGTTA CGTGTCTACT ATTTGTCCTG | 2820 |
| GTTAAGAAAT AAAATACTTC ACAATGATCC AGAAGTTGAG AAGAAGCAGG GATGGACAAC | 2880 |
| CGTAGGGGAT TTGGAAGGAT GTGTACATTA TAAAGTTGTA AAATATGAAA GAATCAAATT | 2940 |
| TCTGGTGATT GCTTTGAAGA GTTCTGTGGA AGTCTATGCG TGGGCACCAA AGCCATATCA | 3000 |
| CAAATTTATG GCCTTTAAGT CATTTGGAGA ATTGGTACAT AAGCCATTAC TGGTGGATCT | 3060 |
| CACTGTTGAG GAAGGCCAGA GGTTGAAAGT GATCTATGGA TCCTGTGCTG GATTCCATGC | 3120 |
| TGTTGATGTG GATTCAGGAT CAGTCTATGA CATTTATCTA CCAACACATG TAAGAAAGAA | 3180 |
| CCCACACTCT ATGATCCAGT GTAGCATCAA ACCCCATGCA ATCATCATCC TCCCCAATAC | 3240 |
| AGATGGAATG GAGCTTCTGG TGTGCTATGA AGATGAGGGG GTTTATGTAA ACACATATGG | 3300 |
| AAGGATCACC AAGGATGTAG TTCTACAGTG GGGAGAGATG CCTACATCAG TAGCATATAT | 3360 |
| TCGATCCAAT CAGACAATGG GCTGGGGAGA GAAGGCCATA GAGATCCGAT CTGTGGAAAC | 3420 |
| TGGTCACTTG GATGGTGTGT TCATGCACAA AAGGGCTCAA AGACTAAAAT TCTTGTGTGA | 3480 |
| ACGCAATGAC AAGGTGTTCT TTGCCTCTGT TCGGTCTGGT GGCAGCAGTC AGGTTTATTT | 3540 |
| CATGACCTTA GGCAGGACTT CTCTTCTGAG CTGGTAGAAG CAGTGTGATC CAGGGATTAC 3600 | |
| TGGCCTCCAG AGTCTTCAAG ATCCTGAGAA CTTGGAATTC CTTGTAAC GAGCTCGGAG | 3660 |
| CTGCACCGAG GGCAACCAGG ACAGCTGTGT GTGCAGACCT CATGTGTTCG GTTCTCTCCC | 3720 |
| CTCCTTCCTG TTCCTCTTAT ATACCAGTTT ATCCCCATTC TTTTTTTTTT TCTTACTCCA | 3780 |
| AAATAAATCA AGGCTGCAAT GCAGCTGGTG CTGTTCAGAT TCCAAAAAAA AAAAAAAACC | 3840 |
| ATGGTACCCG GATCCTCGAA TTCC | |

ACF8 DNA sequence
Gene name: Phospholipase A2, group IVC (cytosolic, calcium-independent)
Unigene number: Hs.18858
Probeset Accession #: AA054087
Nucleic Acid Accession #: NM_003706
Coding sequence: 310-1935 (predicted start/stop codons underlined)

| | |
|---|---|
| CACGAGGCAG GGGCCATTTT ACCTCCAGGT TGGCCCTGCT CAGGACCAGG AGGAAACACC | 60 |
| TCCAGCCCGC GACCTCCTCC CACAGGGGGA AAAGGAAAGC AGGAGGACCA CAGAAGCTTT | 120 |
| GGCACCGAGG ATCCCCGCAG TCTTCACCCG CGGAGATTCC GGCTGAAGGA GCTGTCCAGC | 180 |
| GACTACACCG CTAAGCGCAG GGAGCCCAAG CCTCCGCACC GGATTCCGGA GCACAAGCTC | 240 |
| CACCGCGCAT GCGCACACGC CCCAGACCCA GGCTCAGGAG GACTGAGAAT TTTCTGACCG | 300 |
| CAGTGCACCA TGGGAAGCTC TGAAGTTTCC ATAATTCCTG GGCTCCAGAA AGAAGAAAAG | 360 |
| GCGGCCGTGG AGAGACGAAG ACTTCATGTG CTGAAAGCTC TGAAGAAGCT AAGGATTGAG | 420 |
| GCTGATGAGG CCCCAGTTGT TGCTGTGCTG GGCTCAGGCG GAGGACTGCG GGCTCACATT | 480 |
| GCCTGCCTTG GGGTCCTGAG TGAGATGAAA GAACAGGGCC TGTTGGATGC CGTCACGTAC | 540 |
| CTCGCAGGGG TCTCTGGATC CACTTGGGCA ATATCTTCTC TCTACACCAA TGATGGTGAC | 600 |
| ATGGAAGCTC TCGAGGCTGA CCTGAAACAT CGATTTACCC GACAGGAGTG GGACTTGGCT | 660 |
| AAGAGCCTAC AGAAAACCAT CCAAGCAGCG AGGTCTGAGA ATTACTCTCT GACCGACTTC | 720 |
| TGGGGCTACA TGGTTATCTC TAAGCAAACC AGAGAACTGC CGGAGTCTCA TTTGTCCAAT | 780 |
| ATGAAGAAGC CCGTGGAAGA AGGGACACTA CCCTACCCAA TATTTGCAGC CATTGACAAT | 840 |
| GACCTGCAAC CTTCCTGGCA GGAGGCAAGA GCACCAGAGA CCTGGTTCGA GTTCACCCCT | 900 |
| CACCACGCTG GCTTCTCTGC ACTGGGGGCC TTTGTTTCCA TAACCCACTT CGGAAGCAAA | 960 |
| TTCAAGAAGG GAAGACTGGT CAGAACTCAC CCTGAGAGAG ACCTGACTTT CCTGAGAGGT | 1020 |
| TTATGGGGAA GTGCTCTTGG TAACACTGAA GTCATTAGGG AATACATTTT TGACCAGTTA | 1080 |
| AGGAATCTGA CCCTGAAAGG TTTATGGAGA AGGGCTGTTG CTAATGCTAA AAGCATTGGA | 1140 |
| CACCTTATTT TTGCCCGATT ACTGAGGCTG CAAGAAAGTT CACAAGGGGA ACATCCTCCC | 1200 |
| CCAGAAGATG AAGGCGGTGA GCCTGAACAC ACCTGGCTGA CTGAGATGCT CGAGAATTGG | 1260 |
| ACCAGGACCT CCCTGGAAAA GCAGGAGCAG CCCCATGAGG ACCCCGAAAG GAAAGGCTCA | 1320 |
| CTCAGTAACT TGATGGATTT TGTGAAGAAA ACAGGCATTT GCGCTTCAAA GTGGGAATGG | 1380 |
| GGGACCACTC ACAACTTCCT GTACAAACAC GGTGGCATCC GGGACAAGAT AATGAGCAGC | 1440 |
| CGGAAGCACC TCCACCTGGT GGATGCTGGT TTAGCCATCA ACACTCCCTT CCCACTCGTG | 1500 |
| CTGCCCCCGA CGCGGGAGGT TCACCTCATC CTCTCCTTCG ACTTCAGTGC CGGAGATCCT | 1560 |
| TTCGAGACCA TCCGGGCTAC CACTGACTAC TGCCGCCGCC ACAAGATCCC CTTTCCCCAA | 1620 |
| GTAGAAGAGG CTGAGCTGGA TTTGTGGTCC AAGGCCCCCG CCAGCTGCTA CATCCTGAAA | 1680 |
| GGAGAAACTG GACCAGTGGT GATACATTTT CCCCTGTTCA ACATAGATGC CTGTGGAGGT | 1740 |
| GATATTGAGG CATGGAGTGA CACATACGAC ACATTCAAGC TTGCTGACAC CTACACTCTA | 1800 |
| GATGTGGTGG TGCTACTCTT GGCATTAGCC AAGAAGAATG TCAGGGAAAA CAAGAAGAAG | 1860 |
| ATCCTTAGAG AGTTGATGAA CGTGGCCGGG CTCTACTACC CGAAGGATAG TGCCCGAAGT | 1920 |
| TGCTGCTTGG CATAGATGAG CCTCAGCTTC CAGGGCACTG TGGGCCTGTT GGTCTACTAG | 1980 |
| GGCCCTGAAG TCCACCTGGC CTTCCTGTTC TTCACTCCCT TCAGCCACAC GCTTCATGGC | 2040 |
| CTTGAGTTCA CCTTGGCTGT CCTAACAGGG CCAATCACCA GTGACCAGCT AGACTGTGAT | 2100 |
| TTTGATAGCG TCATTCAGAA GAAGGTGTCC AAGGAGCTGA AGGTGGTGAA ATTTGTCCTG | 2160 |
| CAGGTCCCTC GGGAGATCCT GGAGCTGGAG CATGAGTGTC TGACAATCAG AAGCATCATG | 2220 |
| TCCAATGTCC AGATGGCCAG AATGAATGTG ATAGTTCAGA CCAATGCCTT CCACTGCTCC | 2280 |
| TTTATGACTG CACTTCTAGC CAGTAGCTCT GCACAAGTTA GCTCTGTAGA AGTAAGAACT | 2340 |
| TGGGCTTAAA TCATGGGCTA TCTCTCCACA GCCAAGTGGA GCTCTGAGAA TACAACAAGT | 2400 |
| GCTCAATAAA TGCTTGCTGA TTGACTGATG AAAAAAAAAA AAAAAAAAAA AAAAAAAAAA | 2460 |
| AAAAAAAAAA AAAAAAAAAA AAAAAAAAAA AAAA | |

ACG1 DNA sequence
Gene name: Carbohydrate (chondroitin 6/keratan) sulfotransferase 1
Unigene number: Hs.104576
Probeset Accession #: AA868063
Nucleic Acid Accession #: NM_002654
Coding sequence: 367-1602 (predicted start/stop codons underlined)

| | |
|---|---|
| GGGGAGGGCG CGGGAGGCGG AGGATGCCGC CGCGGCTGCT GCCGCCGCCG CCACCCGCGG | 60 |
| GTCCCCGGCG ACCCTACTCC AGACCCGAGG ATGGAGCCGG CGCTGGGCGC TGCAGCTGCT | 120 |
| CCCGGCGCGT CCCCGACCAG GTAGCTGGTG TCACTTCGGT GTGGTTGGAA GAAGACTTTC | 180 |
| TCCCCAGCTG CATTCCCGGA GGCGCCCTTT CGACCTGGAG GCCGGGTCTG CTGGCCACAG | 240 |
| GGCTGCCGCA CTGGCTGGGA CTGCCAGCTG GGCCTGGAGA CGCTGGTGGC TGTGGACTCC | 300 |
| CCAGCTTGGA GCAGTCCCTC TTTGACCTCA CCCCTTGGAG AAGCAGCCCC ATGAAGGTGC | 360 |
| CCAGCCATGC AATGTTCCTG GAAGGCCGTC CTCCTCCTTG CCCTGGCCTC CATTGCCATC | 420 |
| CAGTACACGG CCATCCGCAC CTTCACCGCC AAGTCCTTTC ACACCTGCCC CGGGCTGGCA | 480 |
| GAGGCCGGGC TGGCCGAGCG ACTGTGCGAG GAGAGCCCCA CCTTCGCCTA CAACCTCTCC | 540 |
| CGCAAGACCC ACATCCTCAT CCTGGCCACC ACGCGCAGCG GCTCCTCCTT CGTGGGCCAG | 600 |
| CTCTTCAACC AGCACCTGGA CGTCTTCTAC CTGTTTGAGC CCCTCTACCA CGTCCAGAAC | 660 |
| ACGCTCATCC CCCGCTTCAC CCAGGGCAAG AGCCCGGCCG ACCGGCGGGT CATGCTAGGC | 720 |
| GCCAGCCGCG ACCTCCTGCG GAGCCTCTAC GACTGCGACC TCTACTTCCT GGAGAACTAC | 780 |
| ATCAAGCCGC CGCCGGTCAA CCACACCACC GACAGGATCT TCCGCCGCGG GGCCAGCCGG | 840 |
| GTCCTCTGCT CCCGGCCTGT GTGCGACCCT CCGGGGCCAG CCGACCTGGT CCTGGAGGAG | 900 |
| GGGGACTGTG TGCGCAAGTG CGGGCTACTC AACCTGACCG TGGCGGCCGA GGCGTGCCGC | 960 |
| GAGCGCAGCC ACGTGGCCAT CAAGACGGTG CGCGTGCCCG AGGTGAACGA CCTGCGCGCC | 1020 |
| CTGGTGGAAG ACCCGCGATT AAACCTCAAG GTCATCCAGC TGGTCCGAGA CCCCCGCGGC | 1080 |
| ATTCTGGCTT CGCGCAGCGA GACCTTCCGC GACACGTACC GGCTCTGGCG GCTCTGGTAC | 1140 |
| GGCACCGGGA GGAAACCCTA CAACCTGGAC GTGACGCAGC TGACCACGGT GTGCGAGGAC | 1200 |
| TTCTCCAACT CCGTGTCCAC CGGCCTCATG CGGCCCCCGT GGCTCAAGGG CAAGTACATG | 1260 |
| TTGGTGCGCT ACGAGGACCT GGCTCGGAAC CCTATGAAGA AGACCGAGGA GATCTACGGG | 1320 |
| TTCCTGGGCA TCCCGCTGGA CAGCCACGTG GCCCGCTGGA TCCAGAACAA CACGCGGGGC | 1380 |
| GACCCCACCC TGGGCAAGCA CAAATACGGC ACCGTGCGAA ACTCGGCGGC CACGGCCGAG | 1440 |
| AAGTGGCGCT TCCGCCTCTC CTACGACATC GTGGCCTTTG CCCAGAACGC CTGCCAGCAG | 1500 |
| GTGCTGGCCC AGCTGGGCTA CAAGATCGCC GCCTCGGAGG AGGAGCTGAA GAACCCCTCG | 1560 |
| GTCAGCCTGG TGGAGGAGCG GGACTTCCGC CCCTTCTCGT GACCCGGGCG GTGCGGGTGG | 1620 |
| GGGCGGGAGG CGCAAGGTGT CGGTTTTGAT AAAATGGACC GTTTTTAACT GTTGCCTTAT | 1680 |
| TAACCCCTCC CTCTCCCACC TCATCTTCGT GTCCTTCCTG CCCCCAGCTC ACCCCACTCC | 1740 |
| CTTCTGCCCC TTTTTTGTCT CTGAAATTTG CACTACGTCT TGGACGGGAA TCACTGGGGC | 1800 |
| AGAGGGCGCC TGAAGTAGGG TCCCGCCCCC CCCACCCCAT TCAGACACAT GGATGTTGGG | 1860 |
| TCTCTGTGCG GACGGTGACA ATGTTTACAA GCACCACATT TACACATCCA CACACGCACA | 1920 |
| CGGGCACTCG CGAGGCGACT TCTCAAGCTT TTGAATGGGT GAGTGGTCGG GTATCTAGTT | 1980 |
| TTTGCACTGT CTTACTATTC AAGGTAAGAG GATACAAACA AGAGGACCAC TTGTCTCTAA | 2040 |
| TTTATGAATG GTGTCCATCC TTTCCCCATC CCTGCCTCCT GCCCCTGACG CCCATTTCCC | 2100 |
| CCCTTAGAGC AGCGAAACTG CCCCCTCCTG CCCGCCCTTG CCTGTCGGTG AGGCAGGTTT | 2160 |
| TTACTGTGAG GTGAACGTGG ACCTGTTTCT GTTTCCAGTC TGTGGTGATG CTGTCTGTCT | 2220 |
| GTCTGAGTCT CGTGGCCGCC CCTGGACCAG TGATGACTGA TGAATCTTAT GAGCTTCTGA | 2280 |
| TTGATCTCGG GGTCCATCTG TGATATTTCT TTGTGCCAAA AAGAAAAAAA AAGAGTGGAT | 2340 |
| CAGTTTGCTA AATGAACATT GAAATTGAAA TGCTTTATCT GTGTTTTCTG TAAATAAAAG | 2400 |
| AGTGCAATAA TCACC | |

ACG5 DNA sequence
Gene name: Multimerin
Unigene number: Hs.268107
Probeset Accession #: U27109
Nucleic Acid Accession #: U27109.1
Coding sequence: 72-3758 (predicted start/stop codons underlined)

| | |
|---|---|
| CTGCTATCAA AAAGGCCATA AGGATTTTGT CCCCAAATTT CACATGAGCT ACCTTGCTTC | 60 |
| AAACTACTGA GATGAAGGGG GCAAGATTAT TTGTCCTTCT TTCTAGTTTA TGGAGTGGGG | 120 |
| GCATTGGGCT TAACAACAGT AAGCATTCTT GGACTATACC TGAGGATGGG AACTCTCAGA | 180 |
| AGACTATGCC TTCTGCTTCA GTTCCTCCAA ATAAAATACA AAGTTTGCAA ATACTGCCAA | 240 |
| CCACTCGGGT CATGTCGGCG GAGATAGCTA CAACTCCAGA GGCAAGAACT TCTGAAGACA | 300 |
| GTCTTCTTAA ATCAACACTG CCTCCCTCAG AAACAAGTGC ACCTGCTGAG GGTGTGAGAA | 360 |
| ATCAAACTCT CACATCCACA GAGAAAGCAG AAGGAGTGGT CAAGTTACAG AATCTTACCC | 420 |
| TCCCAACCAA CGCTAGCATC AAGTTCAATC CTGGAGCAGA ATCAGTGGTC CTTTCCAATT | 480 |
| CTACACTGAA ATTTCTTCAG AGCTTTGCCA GAAAGTCAAA TGAACAAGCA ACTTCTCTAA | 540 |
| ACACAGTTGG AGGCACTGGA GGCATTGGAG GCGTTGGAGG CACTGGAGGC GTGGGAAATC | 600 |
| GAGCCCCACG GGAAACATAC CTCAGCCGGG GTGACAGCAG TTCCAGCCAA AGAACTGACT | 660 |
| ACCAAAAATC AAATTTCGAA ACAACTAGAG GAAAGAATTG GTGTGCTTAT GTACATACCA | 720 |
| GGTTATCTCC CACAGTGACA TTGGACAACC AGGTCACTTA TGTCCCAGGT GGGAAAGGAC | 780 |
| CTTGTGGCTG GACCGGTGGA TCCTGTCCTC AGAGATCTCA GAAGATATCC AATCCTGTCT | 840 |
| ATAGGATGCA ACATAAAATT GTCACCTCAT TGGATTGGAG GTGCTGTCCT GGATACAGTG | 900 |
| GGCCGAAATG TCAACTAAGA GCCCAGGAAC AGCAAAGTTT GATACACACC AACCAGGCTG | 960 |
| AAAGTCATAC AGCTGTTGGC AGAGGAGTAG CTGAGCAGCA GCAGCAGCAA GGCTGTGGTG | 1020 |
| ACCCAGAAGT GATGCAAAAA ATGACTGATC AGGTGAACTA CCAGGCAATG AAACTGACTC | 1080 |
| TTCTGCAGAA GAAGATTGAC AATATTTCTT TGACTGTGAA TGATGTAAGG AACACTTACT | 1140 |
| CCTCCCTAGA AGGAAAAGTC AGCGAAGATA AAAGCAGAGA ATTTCAATCT CTTCTAAAAG | 1200 |
| GTCTAAAATC CAAAAGCATT AATGTACTGA TAAGAGACAT AGTAAGAGAA CAATTTAAAA | 1260 |
| TTTTTCAAAA TGATGCAA GAGACTGTAG CACAGCTCTT CAAGACTGTA TCAAGTCTAT | 1320 |
| CAGAGGACCT CGAAAGCACC AGGCAAATAA TTCAAAAAGT TAATGAATCT GTGGTTTCAA | 1380 |
| TAGCAGCCCA GCAAAAGTTT GTTTTGGTGC AAGAGAATCG GCCCACTTTG ACTGATATAG | 1440 |
| TGGAACTAAG GAATCACATT GTGAATGTAA GGCAAGAAAT GACTCTTACA TGTGAGAAGC | 1500 |
| CTATTAAAGA ACTAGAAGTA AAGCAGACTC ATTTAGAAGG TGCTCTAGAA CAGGAACACT | 1560 |
| CAAGAAGCAT TCTGTATTAT GAATCCCTCA ATAAAACTCT TTCTAAATTG AAGGAAGTAC | 1620 |
| ATGAGCAGCT TTTATCAACT GAACAGGTAT CAGACCAGAA GAATGCTCCA GCTGCTGAGT | 1680 |
| CAGTTAGCAA TAATGTCACT GAGTACATGT CTACTTTACA TGAAAATATA AAGAAGCAGA | 1740 |
| GTTTGATGAT GCTGCAAATG TTTGAAGATT TGCACATTCA AGAAAGCAAG ATTAACAATC | 1800 |
| TCACCGTCTC TTTGGAGATG GAGAAAGAGT CTCTCAGAGG TGAATGTGAA GACATGTTAT | 1860 |
| CCAAATGCAG AAATGATTTT AAATTTCAAC TTAAGGACAC AGAAGAGAAT TTACATGTGT | 1920 |
| TAAATCAAAC ATTGGCTGAA GTTCTCTTTC CAATGGACAA TAAGATGGAC AAAATGAGTG | 1980 |
| AGCAACTAAA TGATTTGACT TATGATATGG AGATCCTTCA ACCCTTGCTT GAGCAGGGAG | 2040 |
| CATCACTCAG ACAGACAATG ACATATGAAC AACCAAAGGA AGCAATAGTG ATAAGGAAAA | 2100 |
| AGATAGAAAA TCTGACTAGT GCTGTCAATA GTCTAAATTT TATTATCAAA GAACTTACAA | 2160 |
| AAAGACACAA CTTACTTAGA AATGAAGTAC AGGGTCGTGA TGATGCCTTA GAAAGACGTA | 2220 |
| TCAATGAATA TGCCTTAGAA ATGGAAGATG GCCTCAATAA GACAATGACT ATTATAAATA | 2280 |
| ATGCTATTGA TTTCATTCAA GATAACTATG CCCTAAAAGA GACTTTAAGT ACTATTAAGG | 2340 |
| ATAATAGTGA GATCCATCAT AAATGTACCT CCGATATGGA AACTATTTTG AGATTTATTC | 2400 |
| CTCAGTTCCA CCGTCTGAAT GATTCTATTC AGACTTTGGT CAATGACAAT CAGAGATATA | 2460 |
| ACTTTGTTTT GCAAGTCGCC AAGACCCTTG CAGGTATTCC CAGAGATGAG AAACTAAATC | 2520 |
| AGTCCAACTT CCAAAAGATG TATCAAATGT TCAATGAAAC CACTTCCCAA GTGAGAAAAT | 2580 |
| ACCAGCAAAA TATGAGTCAT TTGGAAGAAA AACTACTCTT AACTACCAAG ATTTCCAAAA | 2640 |
| ATTTTGAGAC TCGGTTGCAA GACATTGAGT CTAAAGTTAC CCAGACGCTC ATACCTTATT | 2700 |
| ATATTTCAGT TAAAAAAGGC AGTGTAGTTA CAAATGAGAG AGATCAGGCT CTTCAACTGC | 2760 |
| AAGTATTAAA TTCCAGATTT AAGGCGTTGG AAGCAAAATC TATCCATCTT TCAATTAACT | 2820 |
| TCTTTTCGCT TAACAAAACT CTCCACGAAG TTTTAACAAT GTGTCACAAT GCTTCTACAA | 2880 |
| GTGTGTCAGA ACTGAATGCT ACCATCCCTA AGTGGATAAA ACATTCCCTG CCAGATATTC | 2940 |
| AACTTCTTCA GAAAGGTCTA ACAGAATTTG TGGAACCAAT AATTCAAATA AAAACTCAAG | 3000 |
| CTGCCCTATC TAATTCAACT TGTTGTATAG ATCGATCGTT GCCTGGTAGT CTGGCAAATG | 3060 |
| TTGTCAAGTC TCAGAAGCAA GTAAAATCAT TGCCAAAGAA AATTAACGCA CTTAAGAAAC | 3120 |
| CAACGGTAAA TCTTACCACA GTCCTGATAG GCCGGACTCA AAGAAACACG GACAACATAA | 3180 |
| TATATCCTGA GGAGTATTCA AGCTGTAGTC GGCATCCGTG CCAAAATGGG GGCACGTGCA | 3240 |
| TAAATGGAAG AACTAGCTTT ACCTGTGCCT GCAGACATCC TTTTACTGGT GACAACTGCA | 3300 |
| CTATCAAGCT TGTGGAAGAA AATGCTTTAG CTCCAGATTT TTCCAAAGGA TCTTACAGAT | 3360 |
| ATGCACCCAT GGTGGCATTT TTTGCATCTC ATACGTATGG AATGACTATA CCTGGTCCTA | 3420 |
| TCCTGTTTAA TAACTTGGAT GTCAATTATG GAGCTTCATA TACCCCAAGA ACTGGAAAAT | 3480 |
| TTAGAATTCC GTATCTTGGA GTATATGTTT TCAAGTACAC CATCGAGTCA TTTAGTGCTC | 3540 |
| ATATTTCTGG ATTTTTAGTG GTTGATGGAA TAGACAAGCT TGCATTTGAG TCTGAAAATA | 3600 |
| TTAACAGTGA AATACACTGT GATAGGGTTT TAACTGGGGA TGCCTTATTA GAATTAAATT | 3660 |
| ATGGGCAGGA AGTCTGGTTA CGACTTGCAA AAGGAACAAT TCCAGCCAAG TTTCCCCCTG | 3720 |
| TTACTACATT TAGTGGCTAT TTATTATATC GTACATAAGT TAGTATGAAA AACAGACTAT | 3780 |
| CACCTTTATT GAGAAACAGC CAGTGTTTTC ATTTATCTTT GCTTGCACAT CTGCTCTGTT | 3840 |
| TTGGTTTTTC TACAGGAAAT GAAAATCAAC TTGTTTTTTT AATATGAGTA AACTTGTATG | 3900 |
| TCTATTTTAT AAAATTATTT GAATATTGTT TAATGTCTGA ATATGAAAGA GTTCTTGATC | 3960 |
| CTAAAGAAAT TTAGTGGCAC AGAAAACAAA GTGAATTTGT TAGCATAATT ATTCCTATTC | 4020 |
| TTATTTCTTC ATTTTAAGTC ATTGCAATGG AAAGTAATAT TATAAAACGG TAATTACAAC | 4080 |
| ATATTATCAG TCACAGTTTT CTTTCCAATT AAACACTTAA CTTTTGTTAT TCCCTGTATA | 4140 |
| TAAATATATA ACACACATTT TCTAGATTCA CAAATTTAAA TAAATTACTC AAAAAATG | |

ACC6 DNA sequence
Gene name: Homo sapiens cDNA FLJ11502 fis, clone HEMBA1002102, weakly similar to
ANKRYIN
Unigene number: Hs.213194
Probeset Accession #: AA187101
Nucleic Acid Accession #: AK021564
Coding sequence: 1-450 (predicted stop codon underlined, 5′end sequence is open)

| | |
|---|---|
| GTCGCCGCGC GGCCGCCGGT GAGCCGCATG GAGCCCCGGG CGGCGGACGG CTGCTTCCTG | 60 |
| GGCGACGTGG GTTTCTGGGT GGAGCGGACC CCTGTGCACG AGGCAGCCCA GCGGGGTGAG | 120 |
| AGCCTGCAGC TGCAACAGCT GATCGAGAGC GGCGCCTGCG TGAACCAGGT CACCGTGGAC | 180 |
| TCCATCACGC CCCTGCACGC AGCCAGTCTG CAGGGCCAGG CGCGGTGTGT GCAGCTGCTG | 240 |
| CTGGCGGCTG GGGCCCAGGT GGATGCTCGC AACATCGACG GCAGCACCCC GCTCTGCGAT | 300 |
| GCCTGCGCCT CGGGCAGCAT CGAGTGTGTG AAGCTCTTGC TGTCCTACGG GGCCAAGGTC | 360 |
| AACCCTCCCC TGTACACAGC GTCCCCCCTG CACGAGGCCA GCTTTCCCCG CCTCCTGAGC | 420 |
| ACCCTGGCTT CGACGCCCTG GATCAACTGA GCCAGGTGGA ACTCCTGGGG GACATGGATC | 480 |
| GCAATGAATT CGACCAGTAT TTGAACACTC CTGGCCACCC AGACTCCGCC ACAGGGGCCA | 540 |
| TGGCCCTCAG TGGGCATGTT CCGGTCTCCC AGGTGACACC AACGGGTCCC ACAGAGACCA | 600 |
| GCCTCATCTC CGTCCTGGCT GATGCCACGG CCACGTACTA CAACAGCTAC AGTGTGTCAT | 660 |
| AGAGCTGGAG GCGCCCCGTC CGGTCAGCCC TCGCGCCCTC TCCTTCTTGT GCCTTGAGTG | 720 |
| GCAGAGGAGC CGTCCAGCCA CACCAGCTTT CCTCCCACCG CTCAGGGCAG GGAGGTCTGA | 780 |
| ACTGCGGCCC CAGAGCCTTT GGCCTAAGCT GGACTCTCCT TATCCGAGTG CCGCCTCTAT | 840 |
| CCCCTTCCCC ACGTTCCAGC CCCTGCAGCC CACATTTTAA GTATATTCCT TCAAGTGAGT | 900 |
| TTTCCTCCAG CCCCTGAGAG TTGCTGTCTC CCAGTGGAAT GTTCACTGAC GTCTTTTCTT | 960 |
| GGTAGCCATC ATCGAAACTA ATGGGGGGAC AGACTTGATA GCCAAGGTCC CTTCTGGTCC | 1020 |
| AGTTTTCTGA TTTAGGGTTC TCTCAAGATT AATAAAGGAA GATGGGGAAA TTTGACTCAT | 1080 |
| TAATGAGCTC GCTAACCTAC GATCTGGTGA TAATTTTGTG TGCACAGCCC AAGGACCACG | 1140 |
| AGGCTTTCTG CACTTTCTGC ACCCCCTTCC AAAGTGACCA CAAAATTTCA AAGGGACTCA | 1200 |
| TACAATTTGA GAAAAAACAG TCAACCTGAT TTGAGAAATT AACCAGTATG GCTAACTATA | 1260 |
| TCACAGAAAA TGGGATTGAG TTAAAACTAT TTTATTTTAA ATATACATTT TAAAGCAGTT | 1320 |
| CTTTTTTTTT TGTTAATTTG TTTATTATAC ACACACTTCA AGAGAATATG CACAGTCTAG | 1380 |
| GCCGGGCACG GTGGCTCACG CCTGTAATCC CAGCACTTTG GGAGGCCGAG GCATGTGGAT | 1440 |
| CACCTGAGGT CAGGAGTTTG AGACCAGCCT AGACAACATG GTGAAACCTT GTCTCTATGA | 1500 |
| AAAATACAAA ATTTGCTGGG AGTGGTGGTG CATGCCTGTA ATCCCAGCTA CTTGGAAGGC | 1560 |
| TGAGGCAGGA GAATGTCTTG AACCTAGGAG GTGGAGGTTG CAGTGAGCTG AGATTGCACC | 1620 |
| ATTGCACTCC AGCCTGTGCA ACAAGAGTGA AACTCCATTT CAAG | |

ACC7 DNA sequence
Gene name: Human RAL A gene
Unigene number: Hs.6906
Probeset Accession #: AA083572
Nucleic Acid Accession #: contig of X15014.1 and AK026850
Coding sequence: 1-621 (predicted start/stop codons underlined)

| | |
|---|---|
| ATGGCTGCAA ATAAGCCCAA GGGTCAGAAT TCTTTGGCTT TACACAAAGT CATCATGGTG | 60 |
| GGCAGTGGTG GCGTGGGCAA GTCAGCTCTG ACTCTACAGT TCATGTACGA TGAGTTTGTG | 120 |
| GAGGACTATG AGCCTACCAA AGCAGACAGC TATCGGAAGA AGGTAGTGCT AGATGGGGAG | 180 |
| GAAGTCGAGA TCGATATCTT AGATACAGCT GGGCAGGAGG ACTACGCTGC AATTAGAGAC | 240 |
| AACTACTTCC GAAGTGGGGA GGGGTTCCTC TGTGTTTTCT CTATTACAGA AATGGAATCC | 300 |
| TTTGCAGCTA CAGCTGACTT CAGGGAGCAG ATTTTAAGAG TAAAAGAAGA TGAGAATGTT | 360 |
| CCATTTCTAC TGGTTGGTAA CAAATCAGAT TTAGAAGATA AAAGACAGGT TTCTGTAGAA | 420 |
| GAGGCAAAAA ACAGAGCTGA GCAGTGGAAT GTTAACTACG TGGAAACATC TGCTAAAACA | 480 |
| CGAGCTAATG TTGACAAGGT ATTTTTTGAT TTAATGAGAG AAATTCGAGC GAGAAAGATG | 540 |
| GAAGACAGCA AAGAAAAGAA TGGAAAAAAG AAGAGGAAAA GTTTAGCCAA GAGAATCAGA | 600 |
| GAAAGATGCT GCATTTTATA ATCAAAGCCC AAACTCCTTT CTTATCTTGA CCATACTAAT | 660 |
| AAATATAATT TATAAGCATT GCCATTGAAG GCTTAATTGA CTGAAATTAC TTTAACATTT | 720 |
| TGGAAATTGT TGTATATCAC TAAAAGCATG AATTGGAACT GCAATGAAAG TCAAATTTAC | 780 |
| TTTAAAAAGA AATTAATATG GCTTCACCAA GAAGCAAAGT TCAACTTATT TCATAATTGC | 840 |
| CTACATTTAT CATGGTCCTG AATGTAGCGT GTAAGCTTGT GTTTCTTGGG CAGTCTTTCT | 900 |
| TGAAATTGAA GAGGTGAAAT GGGGGTGGGG AGTGGGAGGA AAGGTGACTT CCTCTGGTGT | 960 |
| TTATTATAAA GCTTAAATTT TATATCATTT TAAAATGTCT TGGTCTTCTA CTGCCTTGAA | 1020 |
| AAATGACAAT TGTGAACATG ATAGTTAAAC TACCACTTTT TTTAACCATT ATTATGCAAA | 1080 |
| ATTTAGAAGA AAAGTTATTG GCATGGTTGT TGCATATAGT TAAACTGAGA GTAATTCATC | 1140 |
| TGTGAATCTG CTTTAATTAC CTGGTGAGTA ACTTAGAAAA GTGGTGTAAA CTTGTACATG | 1200 |
| GAATTTTTTG AATATGCCTT AATTTAGAAA CTGAAAAATA TCCGGTTATA TGATTCTGGG | 1260 |
| TGTGTTCTTA CTGACACCAG GGGTCCGCTG CCCCATGTGT CCTGGTGAGA AAATATATGC | 1320 |
| CTGGCACAGC TTTTGTATAG AAAATTCTTG AGAAGTAACT GTCCGCTAGA AGTCTGTCCA | 1380 |
| AATTTAAAAT GTGTGCCATA TTCTGGTTCT TGAAAATAAG ATTCCAGAGC TCTTTGATCG | 1440 |
| CTTTTAATAA ACTGCAAGTT CATTTTAATT GAAGGGCCAG CATATATACT TGCAAGATAA | 1500 |
| TTTTCAGCTG CAAGGATTCA GCACCAGTTA TGTTTGAATG AACCCTCCTT TTCTCTGAGA | 1560 |
| TTCTGGTCCC TGGAAATCCC TTTCTGCTAG TGGTGAGCAT GTAAGTGTTA AGTTTTTAAT | 1620 |
| CTGGGAGCAG GGCATAGGAA GAAAATGTCA GTAGTGCTAA TGCATTTTGC ACTAGAACGC | 1680 |
| TTCGGGAAAA TATTCATGCT TGCCATCTGT TCATTTCTAA ATTTATATTC ATAAAGTTAC | 1740 |
| AGTTTGATAC AGGAATTATT AGGAGTAATT CTTTTCTGTT TCTGTTTATA ATGAAGAACA | 1800 |
| CTGTAGCTAC ATTTTCAGAA GTTAACATCA AGCCATCAAA CCTGGGTATA GTGCAGAAGA | 1860 |
| CGTGGCACAC ACTGACCACA CATTAGGCTG TGTCACCATT GTGTGGTGTA CCTGCTGGAA | 1920 |
| GAATTCTAGC ATGCTACTTG GGGACATAAT TTCAGTGGGA AATATGCCAC TGACCGATTT | 1980 |
| TTTTTTTTTT CCTCTTTGCA GTGGGGCTAG GACAGTTGAT TCAACAAAGT ATTTTTTTCT | 2040 |
| TTTTTCTCAG TCCTAATTTG GACAGGTCAA AGATGTGTTC AGGCATTCCA GGTAACAGGT | 2100 |
| GTGTATGTAA AGTTAAAAAT AGGCTTTTTA GGAACTCACT CTTTAGATAT TTACATCCAG | 2160 |
| CTTCTCATGT TAAATATTTG TCCTTAAAGG GTTTGAGATG TACATCTTTC ATTTCGTATT | 2220 |
| TCTCATAGGC TATGCCATGT GCGGAATTCA AGTTACCAAT GTAACACTGG CCAGCGGGCC | 2280 |
| CAGCAATCTC CATGTGTACT TATTACAGTC TTATTTAACC AGGGGTCCTA ACCACTAACA | 2340 |
| TTGTGACTTT GCTTTGAGAC CTTTCCTCTC CTGGGTACTG AGGTGCTATG AAGCCAACTG | 2400 |
| ACAAAGATGC ATCACGTGTC TTAGGCTGAT GCCACTACCC GATTTGTTTA TTTGCATTT | 2460 |
| GAGCCATTTA AAGACCAATA AACTTCCTTT TTTAAAAAAA AAAAAAAAAA AAAAAAAAAA | 2520 |
| A | |

ACC9 DNA sequence
Gene name: KIAA0955 protein
Unigene number: Hs.10031
Probeset Accession #: AA027168
Nucleic Acid Accession #: AB023172
Coding sequence: 314-1609 (predicted start/stop codons underlined)

| | |
|---|---|
| CTGGTTCTCA ACTTCTTTTG AAATAATGTT CATAGAGAAG GAGGGCTGTC TGAGATTCGA | 60 |
| GGGAAACAAG CTCTCAGGAC TTCCGGTCGC CATGATGGCT GTGGGCGGTA AACGCGGTTA | 120 |
| GTGCAAGCAT CTGGGCCATC TTCAATGGTA AAAAAGATAC AGTAAAGACA TAAATACCAC | 180 |
| ATTTGACAAA TGGAAAAAAA GGAGTGTCCA GAAAAGAGTA GCAGCAGTGA GGAAGAGCTG | 240 |
| CCGAGACGGG TATACAGGGA GCTACCCTGT GTTTCTGAGA CCCTTTGTGA CATCTCACAT | 300 |
| TTTTTCCAAG AAGATGATGA GACAGAGGCA GAGCCATTAT TGTTCCGTGC TGTTCCTGAG | 360 |
| TGTCAACTAT CTGGGGGGGA CATTCCCAGG AGACATTTGC TCAGAAGAGA ATCAAATAGT | 420 |
| TTCCTCTTAT GCTTCTAAAG TCTGTTTTGA GATCGAAGAA GATTATAAAA ATCGTCAGTT | 480 |
| TCTGGGGCCT GAAGGAAATG TGGATGTTGA GTTGATTGAT AAGAGCACAA ACAGATACAG | 540 |
| CGTTTGGTTC CCCACTGCTG GCTGGTATCT GTGGTCAGCC ACAGGCCTCG GCTTCCTGGT | 600 |
| AAGGGATGAG GTCACAGTGA CGATTGCGTT TGGTTCCTGG AGTCAGCACC TGGCCCTGGA | 660 |
| CCTGCAGCAC CATGAACAGT GGCTGGTGGG CGGCCCCTTG TTTGATGTCA CTGCAGAGCC | 720 |
| AGAGGAGGCT GTCGCCGAAA TCCACCTCCC CCACTTCATC TCCCTCCAAG GTGAGGTGGA | 780 |
| CGTCTCCTGG TTTCTCGTTG CCCATTTTAA GAATGAAGGG ATGGTCCTGG AGCATCCAGC | 840 |
| CCGGGTGGAG CCTTTCTATG CTGTCCTGGA AAGCCCCAGC TTCTCTCTGA TGGGCATCCT | 900 |
| GCTGCGGATC GCCAGTGGGA CTCGCCTCTC CATCCCCATC ACTTCCAACA CATTGATCTA | 960 |
| TTATCACCCC CACCCCGAAG ATATTAAGTT CCACTTGTAC CTTGTCCCCA GCGACGCCTT | 1020 |
| GCTAACAAAG GCGATAGATG ATGAGGAAGA TCGCTTCCAT GGTGTGCGCC TGCAGACTTC | 1080 |
| GCCCCCAATG GAACCCCTGA ACTTTGGTTC CAGTTATATT GTGTCTAATT CTGCTAACCT | 1140 |
| GAAAGTAATG CCCAAGGAGT TGAAATTGTC CTACAGGAGC CCTGGAGAAA TTCAGCACTT | 1200 |
| CTCAAAATTC TATGCTGGGC AGATGAAGGA ACCCATTCAA CTTGAGATTA CTGAAAAAAG | 1260 |
| ACATGGGACT TTGGTGTGGG ATACTGAGGT GAAGCCAGTG GATCTCCAGC TTGTAGCTGC | 1320 |
| ATCAGCCCCT CCTCCTTTCT CAGGTGCAGC CTTTGTGAAG GAGAACCACC GGCAACTCCA | 1380 |
| AGCCAGGATG GGGGACCTGA AAGGGGTGCT CGATGATCTC CAGGACAATG AGGTTCTTAC | 1440 |
| TGAGAATGAG AAGGAGCTGG TGGAGCAGGA AAAGACACGG CAGAGCAAGA ATGAGGCCTT | 1500 |
| GCTGAGCATG GTGGAGAAGA AAGGGGACCT GGCCCTGGAC GTGCTCTTCA GAAGCATTAG | 1560 |
| TGAAAGGGAC CCTTACCTCG TGTCCTATCT TAGACAGCAG AATTTGTAAA ATGAGTCAGT | 1620 |
| TAGGTAGTCT GGAAGAGAGA ATCCAGCGTT CTCATTGGAA ATGGATAAAC AGAAATGTGA | 1680 |
| TCATTGATTT CAGTGTTCAA GACAGAAGAA GACTGGGTAA CATCTATCAC ACAGGCTTTC | 1740 |
| AGGACAGACT TGTAACCTGG CATGTACCTA TTGACTGTAT CCTCATGCAT TTTCCTCAAG | 1800 |
| AATGTCTGAA GAAGGTAGTA ATATTCCTTT TAAATTTTTT CCAACCATTG CTTGATATAT | 1860 |
| CACTATTTTA TCCATTGACA TGATTCTTGA AGACCCAGGA TAAAGGACAT CCGGATAGGT | 1920 |
| GTGTTTATGA AGGATGGGGC CTGGAAAGGC AACTTTTCCT GATTAATGTG AAAAATAATT | 1980 |
| CCTATGGACA CTCCGTTTGA AGTATCACCT TCTCATAACT AAAAGCAGAA AAGCTAACAA | 2040 |
| AAGCTTCTCA GCTGAGGACA CTCAAGGCAT ACATGATGAC AGTCTTTTTT TTTTTTGTAT | 2100 |
| GTTAGGACTT TAACACTTTA TCTATGGCTA CTGTTATTAG AACAATGTAA ATGTATTTGC | 2160 |
| TGAAAGAGAG CACAAAAATG GGAGAAAATG CAAACATGAG CAGAAAATAT TTTCCCACTG | 2220 |
| GTGTGTAGCC TGCTACAAGG AGTTGTTGGG TTAAATGTTC ATGGTCAACT CCAAGGAATA | 2280 |
| CTGAGATGAA ATGTGGTAAA TCAACTCCAC AGAACCACCA AAAAGAAAAT GAGGGTAATT | 2340 |
| CAGCTTATTC TGAGACAGAC ATTCCTGGCA ATGTACCATA CAAAAAATAA GCCAACTCTG | 2400 |
| ACATTTGGAT TCTACCATAG ACTCTGTCAT TTTGTAGCCA TTTCAGCTGT CTTTTGATTA | 2460 |
| ATGTTTTCGT GGCACACATA TTTCCATCCT TTTATGTTTA ATCTGTTTAA AACAAGTTCC | 2520 |
| TAGTAGACAC CATCTGGTTG AGTCAGTTTT TTTTATGGTG TATTTTGAAC CCATTCTGAT | 2580 |
| AGTCTCTTTT AACTGGAAGA TTTCAATTAC TTACGTTAAT GTAATTATTA ATATGTTAGG | 2640 |
| ATTTATCCTC AGTCAGCCAG TTTGTTATGT CTTTTCTATT CTACTGTTAT CACATTTGTA | 2700 |
| CCACTTAAAG TGGAATCTAG GCACTTTATC ACCATTTAGA TCCTATTACC TTTTCTCATC | 2760 |
| TAGGATATAG TTATCTTCTA CATAATCTTT CTGTATCTTA AAACCCATCA ATAAATTATT | 2820 |
| ATATATTTTC TACTTTTAAT CACTCAGAAG ATTTAAAAAA CTCATGAGAA GAGTAATCTG | 2880 |
| TTATGTTTTT CCAGATATTT ACCATTTCTG TTGCTCTTCC TTCATTATTT TCCAAATTTC | 2940 |
| GTTCTGCAAA TTTCCACTTC TTCTGATAGA CGTTTTTTAG TTCTTTTAGA GTGGTTCTGA | 3000 |
| TAGGTACAGA TTCTCTTATT TTTTGCTTCC TCTGAGGACA TCTTTTTCTC ACCTTCATTC | 3060 |
| TCAGTGATGT TTTTTGCTTG TAGTATTTTT AGTTGACATT GTTTTCTGTT CAGCAGTTTC | 3120 |
| CTTTTAGCTT CCGTATTTCC TGATGAGAAA TCTGCAGTCA TTCAAATTGT TGTTTCCCTG | 3180 |
| TATGTAGTGT GTCATTTTTC TGTCAGATTT CAAGGTATTT ATCTTTAGTT TTTAGCCATT | 3240 |
| TCATTATGTT GGGGATGAGT TTCCTTGTTT TATTCCCTTT GGAATTTGCT CCAATTCATA | 3300 |
| AATTTGCAGT TTTATGTCTT TTACCAAACT TAGAGGTTTT CAGCCTAATT TCTAAAAATA | 3360 |
| CTTTTATTA GCCTGATTTT CATCTTTATA GGAAATAGTT TAAGTGATGA CAAGTTCCAA | 3420 |
| TAGCTTATAT GCCCAGAAGG CCTTCAAAAT AAGAATTTTG AAAGAATACA GAAAACAAAC | 3480 |
| TTTTATATCC TTCTCATGTC TTCTACTGTA AAATTCATAT GCTTTGCTAC TCTAAACCTA | 3540 |
| GTTTGAAATC AACAGTCTTG AGAATAGATG AAAATTTTGA TGAATAGTGG AATTCTTTTA | 3600 |
| AATGGAAACC TCTTACATGT GATTTTCCTT GCCATCTAGA AATAAACCAT AGTATTTATG | 3660 |
| TTGAATCAAT CAATATTATA TTTTGTTTTT TTCCTCCTCT TCTGAGACTC TTATTGTGGA | 3720 |
| AATGTTAGAC TTTTATGTTT TCCTAAATGT CCCTGATATT CTACTTATTT AGAACATCTT | 3780 |
| TTCATTTTTT CCATTATTCT GATTGGGTAA TTTTAATTTG TCTATTTTCA AATTTGCTGG | 3840 |
| AGTGTTCACC TGTTGTTGTC TGTGTCGTCC CACTGAGTGC ATTCACCACC TTTTAAATTT | 3900 |
| TGGTCACTGT ATGTATCAGT TCTAAAATTT CCATTTTGTT CTCTATATTT TAAATTTCTT | 3960 |
| GGCTTATATT CTATTTTCCT GCAAATGTGT CAGCATTTGC TTGTTTGAGC TTTTTTTTTT | 4020 |
| TCAAGACAGG GTCTCAACTC TGTTACCCAG GCTGGAGTGC AGTGGTGCGA TCTCAGCTCA | 4080 |
| CTGCAACCTC TGCCTCCTGG TTCAAGCGAT TATTGTGCCT CAGCCTCCTG AGTAGCTGGG | 4140 |
| ATTACAGGCA TGCACCACCA CAGCCCAGCT AATTTTTTGT ATTTTTAGTA GAGACAGAGT | 4200 |
| TTTGCTATGT TGGCCAGGCT GGTTTTGAAC TCCTGGCCTC AAGTGATCCA CCGACCTCAG | 4260 |
| CCTCCCAAAG TGCTGGGATT ACAGGCCACT ACACCTGGCA CATTTGAGTA TTTTTTTTTT | 4320 |
| TTTTTTTTTT TTGAGATGGA GTCTCGCTCT GTCATCTAGG CTGGAGTGCA GTGGTGTGAT | 4380 |
| CTCAGCTCAC TGCAGCCTCT GTCTCCCGGG CTCAAGCGAT TCTCTTGCCT CAGCCTCCTG | 4440 |
| AGTAGCTAGG ACTACAGGTG CATGCCAACA CGCCCGGCTA ATTTTTTTAA AAAATATTTT | 4500 |
| TAGTAGAGAC AGGGTTTCAC CATTTTGGCC AGGATGGTCT CGATCTCCTG ACCTCATGAT | 4560 |
| CCACCCGCCT CGGCCTTCCA AAGTGCTGGG ATTACAGGCA TGAGCCACCG TGCCTGGCCT | 4620 |
| CATTTGAGTA TTTTTATAAT GTCTCTTTTA AAGTCTTTGT CAGATAATTC CACTGTACAT | 4680 |
| GTTATTCAGT GTTTGGTGTC CACTGAGTTG TCATTTGCCA GACAAGTGGA GATTTTTGCA | 4740 |
| GCTCATCCTT GTATTCTCAG TAGTTCCGAT ATGTACCCTC GACATGTGAA TGTTATCTTA | 4800 |
| TGAGACTCTG TTTTATTTGT ATCCAACAGA AGATGTTTAT TATTTATTTG GCTTTCTGTG | 4860 |
| AACTGAGGTC TTAATATCAG CTCATTTTAA AAGTCTTTGC AGTGGTATTC GGATCTATCC | 4920 |
| TGTGTGTGCC TATGAGATTG GGTGCAGTGT ATCCTGTTAG CTCCATTCTC AGGGCGTTTG | 4980 |
| AATGTGAATT AGGACCAGCG CAATGAATGC TCAAGTTGGG GTTGGGCGTT AGAATTCATA | 5040 |
| AAAGTCTTTA TATGCTCAG | |

ACF6 DNA sequence
Gene name: Homo sapiens cDNA FLJ10669 fis, clone NT2RP2006275, weakly similar to
Microtubule-associated protein 1B [CONTAINS: LIGHT CHAIN LC1]
Unigene number: Hs.66048
Probeset Accession #: AA609717
Nucleic Acid Accession #: AK001531
Coding sequence: 176-2194 (predicted start/stop codons underlined)

| | |
|---|---|
| CATCTCCCCC AACCTGGGGG TCGTGTTCTT CAACGCCTGC GAGGCCGCGT CGCGGCTGGC | 60 |
| GCGCGGCGAG GATGAGGCGG AGCTGGCGCT GAGCCTCCTG GCGCAGCTGG GCATCACGCC | 120 |
| TCTGCCACTC AGCCGCGGCC CCGTGCCAGC CAAACCCACC GTGCTCTTCG AGAAGATGGG | 180 |
| CGTGGGCCGG CTGGACATGT ATGTGCTGCA CCCGCCCTCC GCCGGCGCCG AGCGCACGCT | 240 |
| GGCCTCTGTG TGCGCCCTGC TGGTGTGGCA CCCCGCCGGC CCCGGCGAGA AGGTGGTGCG | 300 |
| CGTGCTGTTC CCCGGTTGCA CCCCGCCCGC CTGCCTCCTG GACGGCCTGG TCCGCCTGCA | 360 |
| GCACTTGAGG TTCCTGCGAG AGCCCGTGGT GACGCCCCAG GACCTGGAGG GGCCGGGGCG | 420 |
| AGCCGAGAGC AAAGAGAGCG TGGGCTCCCG GGACAGCTCG AAGAGAGAGG GCCTCCTGGC | 480 |
| CACCCACCCT AGACCTGGCC AGGAGCGCCC TGGGGTGGCC CGCAAGGAGC CAGCACGGGC | 540 |
| TGAGGCCCCA CGCAAGACTG AGAAAGAAGC CAAGACCCCC CGGGAGTTGA AGAAAGACCC | 600 |
| CAAACCGAGT GTCTCCCGGA CCCAGCCGCG GGAGGTGCGC CGGGCAGCCT CTTCTGTGCC | 660 |
| CAACCTCAAG AAGACGAATG CCCAGGCGGC ACCCAAGCCC CGCAAAGCGC CCAGCACGTC | 720 |
| CCACTCTGGC TTCCCGCCGG TGGCAAATGG ACCCCGCAGC CCGCCCAGCC TCCGATGTGG | 780 |
| AGAAGCCAGC CCCCCCAGTG CAGCCTGCGG CTCTCCGGCC TCCCAGCTGG TGGCCACGCC | 840 |
| CAGCCTGGAG CTGGGGCCGA TCCCAGCCGG GGAGGAGAAG GCACTGGAGC TGCCTTTGGC | 900 |
| CGCCAGCTCA ATCCCAAGGC CACGCACACC CTCCCCTGAG TCCCACCGGA GCCCCGCAGA | 960 |
| GGGCAGCGAG CGGCTGTCGC TGAGCCCACT GCGGGGCGGG GAGGCCGGGC CAGACGCCTC | 1020 |
| ACCCACAGTG ACCACACCCA CGGTGACCAC GCCCTCACTA CCCGCAGAGG TGGGCTCCCC | 1080 |
| GCACTCGACC GAGGTGGACG AGTCCCTGTC GGTGTCCTTT GAGCAGGTGC TGCCGCCATC | 1140 |
| CGCCCCCACC AGTGAGGCTG GGCTGAGCCT CCCGCTGCGT GGCCCCCGGG CGCGGCGCTC | 1200 |
| GGCTTCCCCA CACGATGTGG ACCTGTGCCT GGTGTCACCC TGTGAATTTG AGCATCGCAA | 1260 |
| GGCGGTGCCA ATGGCACCGG CACCTGCGTC CCCCGGCAGC TCGAATGACA GCAGTGCCCG | 1320 |
| GTCACAGGAA CGGGCAGGTG GGCTGGGGGC CGAGGAGACG CCACCCACAT CGGTCAGCGA | 1380 |
| GTCCCTGCCC ACCCTGTCTG ACTCGGATCC CGTGCCCCTG GCCCCCGGTG CGGCAGACTC | 1440 |
| AGACGAAGAC ACAGAGGGCT TTGGAGTCCC TCGCCACGAC CCTTTGCCTG ACCCCCTCAA | 1500 |
| GGTCCCCCCA CCACTGCCTG ACCCATCCAG CATCTGCATG GTGGACCCCG AGATGCTGCC | 1560 |
| CCCCAAGACA GCACGGCAAA CGGAGAACGT CAGCCGCACC CGGAAGCCCC TGGCCCGCCC | 1620 |
| CAACTCACGC GCTGCCGCCC CCAAAGCCAC TCCAGTGGCT GCTGCCAAAA CCAAGGGGCT | 1680 |
| TGCTGGTGGG GACCGTGCCA GCCCACCACT CAGTGCCCGG AGTGAGCCCA GTGAGAAGGG | 1740 |
| AGGCCGGGCA CCCCTGTCCA GAAAGTCCTC AACCCCCAAG ACTGCCACTC GAGGCCCGTC | 1800 |
| GGGGTCAGCC AGCAGCCGGC CCGGGGTGTC AGCCACCCCA CCCAAGTCCC CGGTCTACCT | 1860 |
| GGACCTGGCC TACCTGCCCA GCGGGAGCAG CGCCCACCTG GTGGATGAGG AGTTCTTCCA | 1920 |
| GCGCGTGCGC GCGCTCTGCT ACGTCATCAG TGGCCAGGAC CAGCGCAAGG AGGAAGGCAT | 1980 |
| GCGGGCCGTC CTGGACGCGC TACTGGCCAG CAAGCAGCAT TGGGACCGTG ACCTGCAGGT | 2040 |
| GACCCTGATC CCCACTTTCG ACTCGGTGGC CATGCATACG TGGTACGCAG AGACGCACGC | 2100 |
| CCGGCACCAG GCGCTGGGCA TCACGGTGTT GGGCAGCAAC GGCATGGTGT CCATGCAGGA | 2160 |
| TGACGCCTTC CCGGCCTGCA AGGTGGAGTT CTAGCCCCAT CGCCGACACG CCCCCCACTC | 2220 |
| AGCCCAGCCC GCCTGTCCCT AGATTCAGCC ACATCAGAAA TAAACTGTGA CTACACTTG | |

[0328] TABLE 2

AAA4 Protein sequence:
Gene name: CGI-100 protein
tlnigene number: Hs.275253
Probeset Accession #: AA089688
Protein Accession #: NP_057124
Signal sequence: predicted 1-23 (first underlined sequence)
Transmembrane Domain: predicted 201-217 (second underlined sequence)
emp24/gp25L/p24 domain: predicted 13-227
Summary: gp25L/emp24/p24 protein family members of the cis-Golgi network
bind both COP I and II coatomer. Members of this family are implicated
in bringing cargo forward from the ER and binding to coat proteins by
their cytoplasmic domains.

| | |
|---|---|
| MGDKIWLPFP VLLLAALPPV LLPGAAGFTP SLDSDFTFTL PAGQKECFYQ PMPLKASLEI | 60 |
| EYQVLDGAGL DIDFHLASPE GKTLVFEQRK SDGVHTVETE VGDYMFCFDN TFSTISEKVI | 120 |
| FFELILDNMG EQAQEQEDWK KYITGTDILD MKLEDILESI NSIKSRLSKS GHIQTLLRAF | 180 |
| EARDRNIQES NFDRVNFWSM VNLVVMVVVS AIQVYMLKSL FEDKRKSRT | |

AAA7 Protein sequence:
Gene name: Endothelial differentiation, sphingolipid G-protein-coupled
receptor, 1
(EDG1)
Unigene number: Hs.154218
Probeset Accession #: M31210
Protein Accession #: NP_001391
7 Transmembrane Domains: predicted 50-71, 92-110, 122-140, 160-177,
201-222, 251-269, 281-301 (underlined sequences)
Summary: Endothelial differentiation, sphingolipid G-protein-coupled
receptor, 1 may regulate the differentiation of endothelial cells. It
binds the sphingolipid metabolite, sphingosine-1-phosphate, which may
function as a second messenger in cell proliferation and survival.

| | |
|---|---|
| MGPTSVPLVK AHRSSVSDYV NYDIIVRHYN YTGKLNISAD KENSIKLTSV VFILICCFII | 60 |
| LENIFVLLTI WKTKKFHRPM YYFIGNLALS DLLAGVAYTA NLLLSGATTY KLTPAQWFLR | 120 |
| EGSMFVALSA SVFSLLAIAI ERYITMLKMK LHNGSNNFRL FLLISACWVI SLILGGLPIM | 180 |
| GWNCISALSS CSTVLPLYHK HYILFCTTVF TLLLLSIVIL YCRIYSLVRT RSRRLTFRKN | 240 |
| ISKASRSSEN VALLKTVIIV LSVFIACWAP LFILLLLDVG CKVKTCDILF RAEYFLVLAV | 300 |
| LNSGTNPIIY TLTNKEMRRA FIRIMSCCKC PSGDSAGKFK RPIIAGMEFS RSKSDNSSHP | 360 |
| QKDEGDNPET IMSSGNYNSS S | |

AAB3 Protein sequence:
Gene name: Solute carrier family 20 (phosphate transporter), member 1,
Human leukaemia virus receptor 1 (GLVR1)
Unigene number: Hs.78452
Probeset Accession #: L20859
Protein Accession #: NP_005406
Transmembrane domains: predicted 24-40, 62-78, 164-180, 198-214, 232-
248, 513-529, 562-578, 604-620, 655-671
Cellular Localization: Likely a Type IIIa membrane protein (Ncyt Cexo)

| | |
|---|---|
| MATLITSTTA ATAASGPLVD YLWMLILGFI IAFVLAFSVG ANDVANSFGT AVGSGVVTLK | 60 |
| QACILASIFE TVGSVLLGAK VSETIRKGLI DVEMYNSTQG LLMAGSVSAM FGSAVWQLVA | 120 |
| SFLKLPISGT HCIVGATIGF SLVAKGQEGV KWSELIKIVM SWFVSPLLSG IMSGILFFLV | 180 |
| RAFILHKADP VPNGLRALPV FYACTVGINL FSIMYTGAPL LGFDKLPLWG TILISVGCAV | 240 |
| FCALIVWFFV CPRMKRKIER EIKCSPSESP LMEKKNSLKE DHEETKLSVG DIENKHPVSE | 300 |
| VGPATVPLQA VVEERTVSFK LGDLEEAPER ERLPSVDLKE ETSIDSTVNG AVQLPNGNLV | 360 |
| QFSQAVSNQI NSSGHSQYHT VHKDSGLYKE LLHKLHLAKV GMGDSGDK PLRRNNSYTS | 420 |
| YTMAICGMPL DSFRAKEGEQ KGEEMEKLTW PNADSKKRIR MDYTSYCNA VSDLHSASEI | 480 |
| DMSVKAAMGL GDRKGSNGSL EEWYDQDKPE VSLLFQFLQI LTACFGSFAH GGNDVSNAIG | 540 |
| PLVALYLVYD TGDVSSKVAT PIWLLLYGGV GICVGLWVWG RRVIQTMGKD LTPITPSSGF | 600 |
| SIELASALTV VIASNIGLPI STTHCKVGSV VSVGWLRSKK AVDWRLFRNI FMAWFVTVPI | 660 |
| SGVISAAIMA IFRYVILRM | |

AAB4 Protein sequence:
Gene name: Matrix metalloproteinase 10 (stromelysin 2)
Unigene number: Hs.2258
Probeset Accession #: X07820
Protein Accession #: NP_002416
Signal sequence: predicted 1-17 (underlined sequence)
Cellular Localization: predicted secreted

| | |
|---|---|
| [sequence omitted] | 60 |
| KKIQGMQKFL GLEVTGKLDT DTLEVMRKPR CGVPDVGHFS SFPGMPKWRK THLTYRIVNY | 120 |
| TPDLPRDAVD SAIEKALKVW EEVTPLTFSR LYEGEADIMI SFAVKEHGDF YSFDGPGHSL | 180 |
| AHAYPPGPGL YGDIHFDDDE KWTEDASGTN LFLVAAHELG HSLGLFHSAN TEALMYPLYN | 240 |
| SFTELAQFRL SQDDVNGIQS LYGPPPASTE EPLVPTKSVP SGSEMPAKCD PALSFDAIST | 300 |
| LRGEYLFFKD RYFWRRSHWN PEPEFHLISA FWPSLPSYLD AAYEVNSRDT VFIFKGNEFW | 360 |
| AIRGNEVQAG YPRGIHTLGF PPTIRKIDAA VSDKEKKKTY FFAADKYWRF DENSQSMEQG | 420 |
| FPRLIADDFP GVEPKVDAVL QAFGFFYFFS GSSQFEFDPN ARMVTHILKS NSWLHC | |

AAB6 Protein sequence:
Gene name: Podocalyxin-like
Unigene number: Hs.16426
Probeset Accession #: U97519
Protein Accession #: NP_005388
Transmembrane domain: predicted 432-448 (underlined sequence)
Cellular Localization: predicted Type Ia membrane protein (Nexo)

| | |
|---|---|
| MRCALALSAL LLLLSTPPLL PSSPSPSPSP SPSQNATQTT TDSSNKTAPT PASSVTIMAT | 60 |
| DTAQQSTVPT SKANEILASV KATTLGVSSD SPGTTTLAQQ VSGPVNTTVA RGGGSGNPTT | 120 |
| TIESPKSTKS ADTTTVATST ATAKPNTTSS QNGAEDTTNS GGKSSHSVTT DLTSTKAEHL | 180 |
| TTPHPTSPLS PRQPTLTHPV ATPTSSGHDH LMKISSSSST VAIPGYTFTS PGMTTTLPSS | 240 |
| VISQRTQQTS SQMPASSTAP SSQETVQPTS PATALRTPTL PETMSSSPTA ASTTHRYPKT | 300 |
| PSPTVAHESN WAKCEDLETQ TQSEKQLVLN LTGNTLCAGG ASDEKLISLI CRAVKATFNP | 360 |
| AQDKCGIRLA SVPGSQTVVV KEITIHTKLP AKDVYERLKD KWDELKEAGV SDMKLGDQGP | 420 |
| PEEAEDRFSM PLIITIVCMA SFLLLVAALY GCCHQRLSQR KDQQRLTEEL QTVENGYHDN | 480 |
| PTLEVMETSS EMQEKKVVSL NGELGDSWIV PLDNLTKDDL DEEEDTHL | |

AAB8 Protein sequence:
Gene name: EGF-containing fibulin-like extracellular matrix protein 1
Unigene number: Hs.76224
Probeset Accession #: U03877
Protein Accession #: NP_004096 Variant 1
Signal sequence: predicted 1-17 (underlined sequence)
Summary: This gene spans approximately 18 kb of genomic DNA and consists
of 12 exons. Two transcripts with distinct 5′ UTR have been des-
cribed; the resulting proteins have distinct N-terminal amino acid se-
quences. Translation initiation from internal methionine residues was
observed with in vitro translation. A signal peptide sequence is pre-
dicted for translation initiation sites 1, 2, and 4. The protein iso-
forms contain 5 or 6 calcium-binding EGF2 domains and 5 or 6 EGF2
domains. Mutations in this gene cause the retinal disease Malattia Leven-
tinese. Transcript Variant: This variant (1) has a distinct 5′ UTR and
N-terminal protein sequence as compared to variant 2.

| | |
|---|---|
| MLKALFLTML TLALVKSQDT EETITYTQCT DGYEWDPVRQ QCKDIDECDI VPDACKGGMK | 60 |
| CVNHYGGYLC LPKTAQIIVN NEQPQQETQP AEGTSGATTG VVAASSMATS GVLPGGGFVA | 120 |
| SAAAVAGPEM QTGRNNFVIR RNPADPQRIP SNPSHRIQCA AGYEQSEHNV CQDIDECTAG | 180 |
| THNCRADQVC INLRGSFACQ CPPGYQKRGE QCVDIDECTI PPYCHQRCVN TPGSFYCQCS | 240 |
| PGFQLAANNY TCVDINECDA SNQCAQQCYN ILGSFICQCN QGYELSSDRL NCEDIDECRT | 300 |
| SSYLCQYQCV NEPGKFSCMC PQGYQVVRSR TCQDINECET TNECREDEMC WNYHGGFRCY | 360 |
| PRNPCQDPYI LTPENRCVCP VSNAMCRELP QSIVYKYMSI RSDRSVPSDI FQIQATTIYA | 420 |
| NTINTFRIKS GNENGEFYLR QTSPVSAMLV LVKSLSGPRE HIVDLEMLTV SSIGTFRTSS | 480 |
| VLRLTIIVGP FSF | |

AAB9 Protein sequence:
Gene name: Melanoma adhesion molecule, MUC 18 glycoprotein
Unigene number: Hs.211579
Probeset Accession #: M28882
Protein Accession #: NP_006491
Signal sequence: predicted 1-17 (first underlined sequence)
Transmembrane domain: predicted 559-575 (second underlined sequence)
Cellular localization: predicted Type Ia membrane protein (Nexo)

| | |
|---|---|
| MGLPRLVCAF LLAACCCCPR VAGVPGEAEQ PAPELVEVEV GSTALLKCGL SQSQGNLSBV | 60 |
| DWFSVHKEKR TLIFRVRQGQ GQSEPGEYEQ RLSLQDRGAT LALTQVTPQD ERIFLCQGKR | 120 |
| PRSQEYRIQL RVYKAPEEPN IQVNPLGIPV NSKEPEEVAT CVGRNGYPIP QVIWYKNGRP | 180 |
| LKEEKNRVHI QSSQTVESSG LYTLQSILKA QLVKEDKDAQ FYCELNYRLP SGNHMKESRE | 240 |
| VTVPVFYPTE KVWLEVEPVG MLKEGDRVEI RCLADGNPPP HFSISKQNPS TREAEEETTN | 300 |
| DNGVLVLEPA RKEHSGRYEC QAWNLDTMIS LLSEPQELLV NYVSDVRVSP AAPERQEGSS | 360 |
| LTLTCEAESS QDLEFQWLRE ETDQVLERGP VLQLHDLKRE AGGGYRCVAS VPSIPGLNRT | 420 |
| QLVKLAIFGP PWMAFKERKV NVKENMVLNL SCEASGHPRP TISWNVNGTA SEQDQDPQRV | 480 |
| LSTLNVLVTP ELLETGVECT ASNDLGKNTS ILFLELVNLT TLTPDSNTTT GLSTSTASPH | 540 |
| TRANSTSTER KLPEPESRGV VIVAVIVCIL VLAVLGAVLY FLYKKGKLPC RRSGKQEITL | 600 |
| PPSRKTELVV EVKSDKLPEE MGLLQGSSGD KRAPGDQGEK YIDLRH | |

AAC1 Protein sequence:
Gene name: Matrix metalloproteinase 1 (interstitial collagenase)
Unigene number: Hs.83169
Probeset Accession #: X54925
Protein Accession #: NP_002412
Signal sequence: predicted 1-19 (underlined sequence)
Cellular localization: predicted secreted protein

| | |
|---|---|
| MHSFPPLLLL LFWGVVSIISF PATLETQEQD VDLVQKYLEK YYNLKNDGRQ VEKRRNSGPV | 60 |
| VEKLKQMQEF FGLKVTGKPD AETLKVMKQP RCGVPDVAQF VLTEGNPRWE QTHLTYRIEN | 120 |
| YTPDLPRADV DHAIEKAFQL WSNVTPLTFT KVSEGQADIM ISFVRGDHRD NSPFDGPGGN | 180 |
| LAHAFQPGPG IGGDAHFDED ERWTNNFREY NLHRVAAHEL GHSLGLSHST DIGALMYPST | 240 |
| TFSGDVQLAQ DDIDGIQAIY GRSQNPVQPI GPQTPKACDS KLTFDAITTI RGEVMFFKDR | 300 |
| FYMRTNPFYP EVELNFISVF WPQLPNGLEA AYEFADRDEV RFFKGNKYWA VQGQNVLHGY | 360 |
| PKDIYSSFGF PRTVKHIDAA LSEENTGKTY FFVANKYWRY DEYKRSMDPG YPKMIAHDFP | 420 |
| GIGHKVDAVF MKDGFFYFFH GTRQYKFDPK TKRILTLQKA NSWFNCRKN | |

AAC3 Protein sequence:
Gene name: Branched chain aminotransferase 1, cytosolic
Unigene number: Hs.157205
Probeset Accession #: AA423987
Protein Accession #: NP_005495
Cellular Localization: cytolasmic
Summary: The lack of the cytosolic enzyme branched-chain amino acid tran-
saminase (BCT) causes cell growth inhibition. There may be at least 2 dif-
ferent clinical disorders due to a defect of branched-chain amino acid
transamination: hypervalinemia and hyperleucine-isoleucinemia. Since
there are 2 distinct BCATS, mitochondrial and cytosolic, it is possible
that one is mutant in each of these 2 conditions.

| | |
|---|---|
| MDCSNGSAEC TGEGGSKEVV GTFKAKDLIV TPATILKEKP DPNNLVFGTV FTDHMLTVEW | 60 |
| SSEFGWEKPH IKPLQNLSLH PGSSALHYAV ELFEGLKAFR GVDNKIRLFQ PNLNMDRNYR | 120 |
| SAVRATLPVF DKEELLECIQ QLVKLDQEWV PYSTSASLYI RPAFIGTEPS LGVKXPTKAL | 180 |
| LFVLLSPVGP YFSSGTFNPV SLWANPKYVR AWKGGTGDCK MGGNYGSSLF AQCEDVDNGC | 240 |
| QQVLWLYGRD HQITEVGTMN LFLYWINEDG EEELATPPLD GIILPGVTRR CILDLAHQWG | 300 |
| EFKVSERYLT MDDLTTALEG NRVREMFSSG TACVVCPVSD ILYKGETIHI PTMENGPKLA | 360 |
| SRILSKLTDI QYGREESDWT IVLS | |

ACG4 Protein sequence:
Gene name: Pentaxin-related gene, rapidly induced by IL-1 beta
Unigene number: Hs.2050
Probeset Accession #: M31166
Protein Accession #: NP_002843
Signal sequence: predicted 1-17 (underlined sequence)
Cellular localization: predicted secreted
Summary: TNF-inducible member of hyaluronate binding protein family,
related to CD44

| | |
|---|---|
| MHLLAILFCA LWSAVLAENS DDYDLMYVNL DNEIDNGLHP TEDPTPCDCG QEHSEWDKLF | 60 |
| IMLENSQMRE RMLLQATDDV LRGELQRLRE ELGRLAESLA RPCAPGAPAE ARLTSALDEL | 120 |
| LQATRDAGRR LARMEGAEAQ RPEEAGRALA AVLEELRQTR ADLHAVQGWA ARSWLPAGCE | 180 |
| TAILFPMRSK KIFGSVHPVR PMRLESFSAC IWVKATDVLN KTILFSYGTK RNPYEIQLYL | 240 |
| SYQSIVFVVG GEENKLVAEA MVSLGRWTHL CGTWNSEEGL TSLWVNGELA ATTVEMATGH | 300 |
| IVPEGGILQI GQEKNGCCVG GGFDETLAFS GRLTGFNIWD SVLSNEEIRE TGGAESCHIR | 360 |
| GNIVGWGVTE IQPHGGAQYV S | |

ACK5 Protein sequence:
Gene name: Von Willebrand factor; Coagulation factor VIII
Unigene number: Hs.110802
Probeset Accession #: M10321
Protein Accession #: NP_000543
Signal peptide: predicted 1-22 (underlined sequence)
Cellular localization: predicted secreted

| | |
|---|---|
| MIPARFAGVL LALALILPGT LCAEGTRGRS STARCSLFGS DFVNTFDGSM YSFAGYCSYL | 60 |
| LAGGCQKRSF SIIGDFQNGK RVSLSVYLGE FFDIHLFVNG TVTQGDQRVS MPYASKGLYL | 120 |
| ETEAGYYKLS GEAYGFVARI DGSGNFQVLL SDRYFNKTCG LCGNFNIFAE DDFMTQEGTL | 180 |
| TSDPYDFANS WALSSGEQWC ERASPPSSSC NISSGEMQKG LWEQCQLLKS TSVFARCHPL | 240 |
| VDPEPFVALC EKTLCECAGG LECACPALLE YARTCAQEGM VLYGWTDHSA CSPVCPAGME | 300 |
| YRQCVSPCAR TCQSLHINEM CQERCVDGCS CPEGQLLDEG LCVESTECPC VHSGKRYPPG | 360 |
| TSLSRDCNTC ICRNSQWICS NEECPGECLV TGQSHFKSFD NRYFTFSGIC QYLLARDCQD | 420 |
| HSFSIVIETV QCADDRDAVC TRSVTVRLPG LHNSLVKLKH GAGVAMDGQD IQLPLLKGDL | 480 |
| RIQHTVTASV RLSYGEDLQM DWDGRGRLLV KLSPVYAGKT CGLCGNYNGN QGDDFLTPSG | 540 |
| LAEPRVEDFG NAWKLHGDCQ DLQKQHSDPC ALNPPMTRFS EEACAVLTSP TFEACHRAVS | 600 |
| PLPYLRNCRY DVCSCSDGRE CLCGALASYA AACAGRGVRV AWREPGRCEL NCPKGQVYLQ | 660 |
| CGTPCNLTCR SLSYPDEECN EACLEGCFCP PGLYMDERGD CVPKAQCPCY YDGEIFQPED | 720 |
| IFSDHHTMCY CEDGFMHCTM SGVPGSLLPD AVLSSPLSHR SKRSLSCRPP MVKLVCPADN | 780 |
| LRAEGLECTK TCQNYDLECM SMGCVSGCLC PPGMVRHENR CVALERCPCF NQGKEYAPGE | 840 |
| TVKIGCNTCV CPDRKWNCTD HVCDATCSTI GMAHYLTFDG LKYLFPGECQ YVLVQDYCGS | 900 |
| NPGTFRILVG NKGCSHPSVK CKKRVTILVE GGEIELFDGE VNVKRPMKDE THFEVVESGR | 960 |
| YIILLLGKAL SVVWDRHLSI SVVLKQTYQE KVCGLCGNFD GIQNNDLTSS NLQVEEDPVD | 1020 |
| FGNSWKVSSQ CADTRKVPLD SSPATCHNNI MKQTMVDSSC RILTSDVFQD CNKLVDPEPY | 1080 |
| LDVCIYDTCS CESIGDCACF CDTIAAYAHV CAQHGKVVTW RTATLCPQSC EERNLRENGY | 1140 |
| ECEWRYNSCA PACQVTCQHP EPLACPVQCV EGCHAHCPPG KILDELLQTC VDPEDCPVCE | 1200 |
| VAGRRFASGK KVTLNPSDPE HCQICHCDVV NLTCEACQEP GGLVVPPTDA PVSPTTLYVE | 1260 |
| DISEPPLHDF YCSRLLDLVF LLDGSSRLSE AEFEVLKAFV VDNMERLRIS QKNVRVAVVE | 1320 |
| YHDGSHAYIG LKDRKRPSEL RRIASQVKYA GSQVASTSEV LKYTLFQIFS KIDRPEASRI | 1380 |
| ALLLMASQEP QRMSRNFVRY VQGLKKKKVI VIPVGIGPHA NLKQIRLIEK QAPENKAFVL | 1440 |
| SSVDELEQQR DEIVSYLCDL APEAPPPTLP PHMAQVTVGP GLLGVSTLGP KRNSMVLDVA | 1500 |
| FVLEGSDKIG EADFNRSKEF MEEVIQRMDV GQDSIHVTVL QYSYMVTVEY PFSEAQSKGD | 1560 |
| ILQRVREIRY QGGNRTNTGL ALRYLSDHSF LVSQGDREQA PNLVYMVTGN PASDEIKRLP | 1620 |
| GDIQVVPIGV GPNANVQELE RIGWPNAPIL IQDFETLPRE APDLVLQRCC SGEGLQIPTL | 1680 |
| SPAPDCSQPL DVILLLDGSS SFPASYFDEM KSFAKAFISK ANIGPRLTQV SVLQYGSITT | 1740 |
| IDVPWNVVPE KAHLLSLVDV MQREGGPSQI GDALGFAVRY LTSEMHGARP GASKAVVILV | 1800 |
| TDVSVDSVDA AADAAPSNRV TVFPIGIGDR YDAAQLRILA GPAGDSNVVK LQRIEDLPTM | 1860 |
| VTLGMSFLHK LCSGFVRICM DEDGNEKRPG DVWTLPDQCH TVTCQPDGQT LLKSHRVNCD | 1920 |
| RGLRPSCPNS QSPVKVEETC GCRWTCPCVC TGSSTRHIVT FDGQNFKLTG SCSYVLFQNK | 1980 |
| EQDLEVILHN GACSPGARQG CMKSIEVKHS ALSVELHSDM EVTVNGRLVS VPYVGGNMEV | 2040 |
| NVYGAIMHEV RFNHLGHIFT FTPQNNEFQL QLSPKTFASK TYGLCGICDE NGANDFMLRD | 2100 |
| GTVTTDWKTL VQEWTVQRPG QTCQPILEEQ CLVPDSSHCQ VLLLPLFAEC HKVLAPATFY | 2160 |
| AICQQDSCHQ EQVCEVIASY AHLCRTNGVC VDWRTPDFCA MSCPPSLVYN HCEHGCPRHC | 2220 |
| DGNVSSCGDH PSEGCFCPPD KVMLEGSCVP EEACTQCIGE DGVQHQFLEA WVPDHQPCQI | 2280 |
| CTCLSGRKVN CTTQPCPTAK APTCGLCEVA RLRQNADQCC PEYECVCDPV SCDLPPVPHC | 2340 |
| ERGLQPTLTN PGECRPNFTC ACRKEECKRV SPPSCPPHRL PTLRKTQCCD EYECACNCVN | 2400 |
| STVSCPLGYL ASTATNDCGC TTTTCLPDKV CVHRSTIYPV GQFWEEGCDV CTCTDMEDAV | 2460 |
| NGLRVAQCSQ KPCEDSCRSG FTYVLHEGEC CGRCLPSACE VVTGSPRGDS QSSWKSVGSQ | 2520 |
| WASPENPCLI NECVRVKEEV FIQQRNVSCP QLEVPVCPSG FQLSCKTSAC CPSCRCERME | 2580 |
| ACMLNGTVIG PGKTVMIDVC TTCRCMVQVG ISGFKLECR KTTCNPCPLG YKEENNTGEC | 2640 |
| CGRCLPTACT IQLRGGQIMT LKRDETLQDG CDTHFCKVNE RGEYFWEKRV TGCPPFDEHK | 2700 |
| CLAEGGKIMK IPGTCCDTCE EPECNDITAR LQYVKVGSCK SEVEVDIHYC QGKCASKAYIY | 2760 |
| SIDINDVQDQ CSCCSPTRTE PMQVALHCTN GSVVYHEVLN AMECKCSPRK CSK | |

AAC7 protein sequence:
Gene name: KIAA1294 protein
Probeset Accession #: AA432248
Protein Accession #: BAA92532
Cellular localization: predicted nuclear protein
PFAM prediction: 22-153 Band 41 domain (underlined seq). A number of
cytoskeletal-associated proteins that associate with various proteins
at the interface between the plasma membrane and the cytoskeleton con-
tain a conserved N-terminal domain of about 150 amino-acid residues.

| | |
|---|---|
| MAVQLVPDSA LGLLMMTEGR RCQVHLLDDR KLELLVQPKL LAKELLDLVA SHFNLKEKEY | 60 |
| FGIAFTDETG HLNWLQLDRR VLEHDFPKKS GPVVLYFCVR FYIESISYLK DNATIELFFL | 120 |
| NAKSCIYKEL IDVDSEVVFE LASYILQEAK GDFSSNEVVR SDLKKLPALP TQALKEHPSL | 180 |
| AYCEDRVIEH YKKLNGQTRG QAIVNYMSIV ESLPTYGVHY YAVKDKQGIP WWLGLSYKGI | 240 |
| FQYDYHDKVK PRKIFQWRQL ENLYFREKKF SVEVHDPRRA SVTRRTFGHS GIAVHTWYAC | 300 |
| PALIKSIWAM AISQHQFYLD RKQSKSKIHA ARSLSEIAID LTETGTLKTS KLCLMGSKGK | 360 |
| IISGSSGSLL SSGSQESDSS QSAKKDMLAA LKSRQEALEE TLRQRLEELK KLCLREAELT | 420 |
| GKLPVEYPLD PGEEPPIVRR RIGTAFKLDE QKILPKGEEA ELERLEREFA IQSQITEAAR | 480 |
| RLASDPNVSK KLKKQRKTSY LNALKKLQEI ENAINENRIK SGKKPTQRAS LIIDDGNIAS | 540 |
| EDSSLSDALV LEDEDSQVTS TISPLHSPHK GLPPRPPSHN RPPPPQSLEG LRQMHYHRND | 600 |
| YDKSPIKPKM WSESSLDEPY EKVKKRSSHS HSSSHKRFPS TGSCAEAGGG SNSLQNSPIR | 660 |
| GLPHWNSQSS MPSTPDLRVR SPHYVHSTRS VDISPTRLHS LALHFRHRSS SLESQGKLLG | 720 |
| SENDTGSPDF YTPRTRSSNG SDPMDDCSSC TSHSSSEHYY PAQMNANYST LAEDSPSKAR | 780 |
| QRQRQRQRAA GALGSASSGS MPNLAARGGA GGAGGAGGGV YLHSQSQPSS QYRIKEYPLY | 840 |
| IEGGATPVVV RSLESDQECH YSVKAQFKTS NSYTAGGLFK ESWRGGGGDE GDTGRLTPSR | 900 |
| SQILRTPSLG REGAHDKGAG RAAVSDELRQ WYQRSTASHK EHSRLSHTSS TSSDSGSQYS | 960 |
| TSSQSTFVAH SRVTRMPQMC KATSAALPQS QRSSTPSSEI GATPPSSPHH ILTWQTGEAT | 1020 |
| ENSPILDGSE SPPHQSTDE | |

ACG8 Protein sequence:
Gene name: ubiquitin E3 ligase SMURF2
Unigene number: Hs.21806 (3′UTR only)
Probeset Accession #: AA398243
Protein Accession #: AF301463_1
Cellular Localization: predicted cytoplasmic
Summary: Smurf 2 Is a Ubiquitin E3 Ligase Mediating Proteasome-dependent
Degradation of Smad2 in Transforming Growth Factor-beta Signaling

| | |
|---|---|
| MSNPGGRRNG PVKLRLTVLC AKNLVKKDFF RLPDPFAKVV VDGSGQCHST DTVKNTLDPK | 60 |
| WNQHYDLYIG KSDSVTISVW NHKKIHKKQG AGFLGCVRLL SNAINRLKDT GYQRLDLCKL | 120 |
| GPNDNDTVRG QIVVSLQSRD RIGTGGQVVD CSRLFDNDLP DGWEERRTAS GRIQYLNHIT | 180 |
| RTTQWERPTR PASEYSSPGR PLSCFVDENT PISGTNGATC GQSSDPRLAE RRVRSQRHRN | 240 |
| YMSRTHLHTP PDLPEGYEQR TTQQGQVYFL HTQTGVSTWH DPRVPRDLSN INCEELGPLP | 300 |
| PGWEIRNTAT GRVYFVDHNN RTTQFTDPRL SANLHLVLNR QNQLKDQQQQ QVVSLCPDDT | 360 |
| ECLTVPRYKR DLVQKLKILR QELSQQQPQA GHCRIEVSRE EIFEESYRQV MKMRPKDLWK | 420 |
| RLMIKFRGEE GLDYGGVARE WLYLLSHEML NPYYGLFQYS RDDIYTLQIN PDSAVNPEHL | 480 |
| SYFHFVGRIM GMAVFHGEYI DGGFTLPFYK QLLGKSITLD DMELVDPDLH NSLVWILEND | 540 |
| ITGVLDHTFC VEHNAYGEII QHELKPNGKS IPVNEENKKE YVRLYVNWRF LRGIEAQFLA | 600 |
| LQKGFNEVIP QHLLKTFDEK ELELIICGLG KIDVNDWKVN TRLKECTPDS NIVKWFWKAV | 660 |
| EFFDEERRAR LLQFVTGSSR VPLQGFKALQ GAAGPRLFTI HQIDACTNNL PKAHTCFNRI | 720 |
| DIPPYESYEK LYEKLLTAIE ETCGFAVE | |

ACE1 Protein sequence:
Gene name: EST
Unigene number: Hs.30089
Probeset Accession #: AA410480
CAT cluster#: cluster 96816_1
Summary: predicted open reading frame

| | |
|---|---|
| PLWTEPPLSC CLPATYPADR GPAEPCSCAG VILGFLLFRG HNSQPTMTQT SSSQGGLGGL | 60 |
| SLTTEPVSSN PGYIPSSEAN RPSHLSSTGT PGAGVPSSGR DGGTSRDTFQ TTPPNSTTMS | 120 |
| LSMREDATIL PSPTSETVLT VAAFGVISFI VILVVVVIIL VGVVSLRFKC RKSKESGDPQ | 180 |
| KPGEREEKVG HRREPYPWN | |

ACJ2 Protein sequence:
Gene name: Complement component Clq receptor
Unigene number: Hs.97199
Probeset Accession #: AA487558
Protein Accession #: NP_036204
Signal sequence: 1-17 (first underlined sequence)
Transmemrane domain: 589-605 (second underlined sequence)
Cellular localization: This gene encodes a predicted type I membrane
protein. Summary: This protein acts as a receptor for complement pro-
tein Clq, mannose-binding lectin, and pulmonary surfactant protein A.
This protein is a functional receptor involved in ligand-mediated
enhancement of phagocytosis.

| | |
|---|---|
| MATSMGLLLL LLLLLTQPGA GTGADTEAVV CVGTACYTAH SGKLSAAEAQ NHCNQNGGNL | 60 |
| ATVKSKEEAQ HVQRVLAQLL RREAALTARM SKFWIGLQRE KGKCLDPSLP LKGFSWVGGG | 120 |
| EDTPYSNWHK ELRNSCISKR CVSLLLDLSQ PLLPNRLPKW SEGPCGSPGS PGSNIEGFVC | 180 |
| KFSFKGMCRP LALGGPGQVT YTTPFQTTSS SLEAVPFASA ANVACGEGDK DETQSHYFLC | 240 |
| KEKAPDVFDW GSSGPLCVSP KYGCNFNNGG CHQDCFEGGD GSFLCGCRPG FRLLDDLVTC | 300 |
| ASRNPCSSSP CRGGATCVLG PHGKNYTCRC PQGYQLDSSQ LDCVDVDECQ DSPCAQECVN | 360 |
| TPGGFRCECW VGYEPGGPGE GACQDVDECA LGRSPCAQGC TNTDGSFHCS CEEGYVLAGE | 420 |
| DGTQCQDVDE CVGPGGPLCD SLCFNTQGSF HCGCLPGWVL APNGVSCTMG PVSLGPPSGP | 480 |
| PDEEDKGEKE GSTVPRAATA SPTRGPEGTP KATPTTSRPS LSSDAPITSA PLKMLAPSGS | 540 |
| SGVWREPSIH HATAASGPQE PAGGDSSVAT QNNDGTDGQK LLLFYILGTV VAILLLLALA | 600 |
| LGLLVYRKRR AKREEKKEKK PQNAADSYSW VPERAESRAM ENQYSPTPGT DC | |

ACJ3 Protein sequence:
Gene name: FLT1/vascular endothelial growth factor receptor
Unigene number: Hs.138671
Probeset Accession #: AA047437
Transmettlbrane domain: predicted 764-780 (underlined sequence)
Cellular Localization: predicted cell surface tyrosine kinase

| | |
|---|---|
| MVSYWDTGVL LCALLSCLLL TGSSSGSKLK DPELSLKGTQ HIMQAGQTLH LQCRGEAAHK | 60 |
| WSLPEMVSKE SERLSITKSA CGRNGKQFCS TLTLNTAQAN HTGFYSCKYL AVPTSKKKET | 120 |
| ESAIYIFISD TGRPFVEMYS EIPEIIHMTE GRELVIPCRV TSPNITVTLK KFPLDTLIPD | 180 |
| GKRIIWDSRK GFIISNATYK EIGLLTCEAT VNGHLYKTNY LTHRQTNTII DVQISTPRPV | 240 |
| KLLRGHTLVL NCTATTPLNT RVQMTWSYPD EKNKRASVRR RIDQSNSHAN IFYSVLTIDK | 300 |
| MQNKDKGLYT CRVRSGPSFK SVNTSVHIYD KAFITVKHRK QQVLETVAGK RSYRLSMKVK | 360 |
| AFPSPEVVWL KDGLPATEKS ARYLTRGYSL IIKDVTEEDA GNYTILLSIK QSNVFKNLTA | 420 |
| TLIVNVKPQI YEKAVSSFPD PALYPLGSRQ ILTCTAYGIP QPTIKWFWHP CNHNHSEARC | 480 |
| DFCSNNEESF ILDADSNMGN RIESITQRMA IIEGKNKMAS TLVVADSRIS GIYICIASNK | 540 |
| VGTVGRNISF YITDVPNGFH VNLEKMPTEG EDLKLSCTVN KFLYRDVTWI LLRTVNNRTM | 600 |
| HYSISKQKMA ITKEHSITLN LTIMNVSLQD SGTYACRARN VYTGEEILQK KEITIRDQEA | 660 |
| PYLLRNLSDH TVAISSSTTL DCHANGVPEP QITWFKNNHK IQQEPGIILG PGSSTLFIER | 720 |
| VTEEDEGVYH CKATNQKGSV ESSAYLTVQG TSDKSNLELI TLTCTCVAAT LFWLLLTLLI | 780 |
| RKMKRSSSEI KTDYLSIIMD PDEVPLDEQC ERLPYDASKW EFARERLKLG KSLGRGAFGK | 840 |
| VVQASAFGIK KSPTCRTVAV KMLKEGATAS EYKALMTELK ILTHIGHHLN VVNLLGACTK | 900 |
| QGGPLMVIVE YCKYGNLSNY LKSKRDLFFL NKDAALHMEP KKEKMEPGLE QGKKPRLDSV | 960 |
| TSSESFASSG FQEDKSLSDV EEEEDSDGFY KEPITMEDLI SYSFQVARGM EFLSSRKCIE | 1020 |
| RDLAARNILL SENNVVKICD FGLARDIYKN PDYVRKGDTR LPLKWMAPES IFDKIYSTKS | 1080 |
| DVWSYGVLLW EIFSLGGSPY PGVQMDEDFC SRLREGMRMR APEYSTPEIY QIMLDCWHRD | 1140 |
| PKERPRFAEL VEKLGDLLQA NVQQDGKDYI PINAILTGNS GFTYSTPAFS EDFFKESISA | 1200 |
| PKFNSGSSDD VRYVNAFKFM SLERIKTFEE LLPNATSMFD DYQGDSSTLL ASPMLKRFTW | 1260 |
| TDSKPKASLK IDLRVTSKSK ESGLSDVSRP SFCHSSCGHV SEGKRRFTYD HAELERKIAC | 1320 |
| CSPPPDYNSV VLYSTPPI | |

ACJ9 Protein sequence:
Gene name: Purine nucleoside phosphorylase
Unigene number: Hs.75514
Probeset Accession #: K02574
Protein Accession #: CAA25320
Cellular Localization: predicted cytoplasmic
Summary: likely to catalyze the reversible phosphorolytic cleavage of
purine ribonucleosides and 2′-deoxyribonucleosides

| | |
|---|---|
| MENGYTYEDY KNTAEWLLSH TKHRPQVAII CGSGLGGLTD KLTQAQIFDY SEIPNFPRST | 60 |
| VPGHAGRLVF GFLNGRACVM MQGRFHMYEG YPLWKVTFPV RVFHLLGVDT LVVTNAAGGL | 120 |
| NPKFEVGDIM LIRDHINLPG FSGQNPLRGP NDERFGDRFP AMSDAYDRTM RQRALSTWKQ | 180 |
| MGEQRELQEG TYVMVAGPSF ETVAECRVLQ KLGADAVGMS TVPEVIVARH CGLRVFGFSL | 240 |
| ITNKVIMDYE SLEKANHEEV LAAGKQAAQK LEQFVSILMA SIPLPDKAS | |

ACK4 Protein sequence
Gene name: EST
Probeset Accession #: R68763
Predicted amino acid seg: FGENESH exon prediction on BAC clone AC009414
Predicted nuclear target motifs: from 25 (4) RRRP (underlined); 176 (5)
RRRR (underlined); 177 (5) RRRR (underlined; 239 (5) KRKK (underlined);
399 (4) PPRARRT (underlined); 400 (5) PRARRTE (underlined)
Cellular localization: predicted nuclear

| | |
|---|---|
| MPPEQHHQPN KVSPKLCSAQ PAPRGRRRPG GRGPAAGGRT FANARFVLGE GVAIERGADD | 60 |
| TTQPPVAGSV NPEGAAAALV PLAGARVAAA ADALHDAPRA VPGLLALGLV TGQADQRPGA | 120 |
| GARQQQQQPQ QRDQEVPAAG QPPVPRHQVH PPAPPPPPPR SRAGSGAGAL PCAGHTRRRR | 180 |
| RTSSPRSSPP LSGPPGRASP RGARPPPLLR AAPTPSPRAL APAAASPPPP PPPPGREGEK | 240 |
| RKKFPPGSSG STQTSGAAAA VAAALGSSPG RRRLLPLLLR VGRPRSGAAS GPVPASRAAE | 300 |
| WARWRSTRSA ASAPRAPLAS LLRRSSGRLF MAGASAARAA PSPILPPPPD LPPTPTRRAP | 360 |
| LIGCPPSPAR PAPSASPSPS RAAGPFLPPS HASTSSRSPP PRARRTEPAV PPSCGSGPGA | 420 |
| AGALRMGLGR TQRAARVAVS RALAGTVAAA AGLGARRARR LHLRGQIGVR RVAGTPEARG | 480 |
| RGDGCSLGRV SPDRTPGKGS KGMEPPHTG | |

AAA8 Protein sequence:
Gene name: ETL protein, with extended open reading frame
Unigene number: Hs.57958
Probeset Accession #: D58024
Protein Accession #: AAG33021
Transmembrane domains: predicted 454-470, 486-502, 511-527, 528-544,
556-572, 600-616, 642-661, 672-689 (underlined sequences) Extended
sequence: Residues 1-564 were added to the sequence in AAG33021
Cellular Localization: predicted cell surface serpentine receptor

| | |
|---|---|
| MKTAALTPPR SPPPPPLRPP PMKRLPLLVV FSTLLNCSYT QNCTKTPCLP NAKCEIRNGI | 60 |
| EACYCNMGFS GNGVTICEDD NECGNLTQSC GENANCTNTE GSYYCMCVPG FRSSSNQDRF | 120 |
| ITNDGTVCIE NVNANCHLDN VCIAANINKT LTKIRSIKEP VALLQEVYRN SVTDLSPTDI | 180 |
| ITYIEILAES SSLLGYKNNT ISAKDTLSNS TLTEFVKTVN NFVQRDTFVV WDKLSVNHRR | 240 |
| THLTKLMHTV EQATLRISQS FQKTTEFDTN STDIALKVFF FDSYNMKHIH PHMNMDGDYI | 300 |
| NIFPKRKAAY DSNGNVAVAF LYYKSIGPLL SSSDNFLLKP QNYDNSEEEE RVISSVISVS | 360 |
| MSSNPPTLYE LEKITFTLSH RKVTDRYRSL CAFWNYSPDT MNGSWSSEGC ELTYSNETHT | 420 |
| SCRCNHLTHF AILMSSGPSI GIKDYNILTR ITQLGIIISL ICLAICIFTF WFFSEIQSTR | 480 |
| TTIHKNLCCS LFLAELVFLV GINTNTNKLX SVSIIAGLLH YFFLAAFAWM CIEGIHLYLI | 540 |
| VVGVIYNKGF LHKNFYIFGY LSPAVVVGFS AALGYRYYGT TKVCWLSTET HFIWSFIGPA | 600 |
| CLIILVNLLA FGVIIYKVFR HTAGLKPEVS CFENIRSCAR GALALLFLLG TTWIFGVLHV | 660 |
| VHASVVTAYL FTVSNAFQGM FIFLFLCVLS RKIQEEYYRL FKNVPCCFGC LR | |

AAC6 Protein sequence:
Gene name: EST
Unigene number: H5.134797
Probeset Accession #: AA025351
Protein accession #: BAB14599
Signal sequence: predicted 1-24 (first underlined sequence)
extended sequence: second underlined sequence

| | |
|---|---|
| MILSLLFSLG GPLGWGLLGA WAQASSTSLS DLQSSRTPGV WKAEAEDTSK DPVGRNWCPY | 60 |
| PMSKLVTLLA LCKTEKFLIH SQQPCPQGAP DCQKVKVMYR MAHKPVYQVK QKVLTSLAWR | 120 |
| CCPGYTGPNC EHHDSMAIPE PADPGDSHQE PQDGPVSFKP GHLAAVINEV EVQQEQQEHL | 180 |
| LGDLQNDVHR VADSLPGLWK ALPGNLTAAV MEANQTGHEF PDRSLEQVLL PHVDTFLQVH | 240 |
| FSPIWRSFNQ SLHSLTQAIR NLSLDVEANR QAISRVQDSA VARADFQELG AKFEAKVQEN | 300 |
| TQRVGQLRQD VEDRLHAQHF TLHRSISELQ ADVDTKLKRL HKAQEAPGTN GSLVLATPGA | 360 |
| GARPEPDSLQ ARLGQLQRL SELHMTTARR EEELQYTLED MRATLTRHVD EIKELYSESD | 420 |
| ETFDQISKVE RQVEELQVH TALRELRVIL MEKSLIMEEN KEEVERQLLE LNLTLQHLQG | 480 |
| GHADLIKYVK DCNCQKLYLD LDVIREGQRD ATRALEETQV SLDERRQLDG SSLQALQNAV | 540 |
| DAVSLAVDAH KAEGERARAA TSRLRSQVQA LDDEVGALKA AAAEARHEVR QLHSAFAALL | 600 |
| EDALRHEAVL AALFGEEVLE EMSEQTPGPL PLSYEQIRVA LQDAASGLQE QALGWDELAA | 660 |
| RVTALEQASE PPRPAEHLEP SHDAGREEAA TTALAGLARE LQSLSNDVKN VGRCCEAEAG | 720 |
| AGAASLNASL DGLHNALFAT QRSLEQHQRL FHSLFGNFQG LMEANVSLDL GKLQTMLSRK | 780 |
| GKKQQKDLEA PRKRDKKEAE PLVDIRVTGP VPGALGAALW EASPVAFYAS FSEGTAALQT | 840 |
| VKFNTTYINI GSSYFPEHGY FRAPERGVYL FAVSVEFGPG PGTGQLVFGG HHRTPVCTTG | 900 |
| QGSGSTATVF AMAELQKGER VWFELTQGSI TKRSLSGTAF GGFLMFKT | |

ACH7 Protein sequence:
Gene name: EST
Unigene number: Hs.3807
Probeset Accession #: AA292694
BAC Accession #: AL161751
FGENESH predicted aa seg: 1-647; based on BAC clone AL161751

| | |
|---|---|
| MGKDFMTKTP KAFATKAKID KWDLIKLKSF CTAKETIIRV NSQPTDWQKT FAIYPSDKGV | 60 |
| IARIYKELEQ IYKKKKPTKT LRTHFLSRPK GNCWPLGPRG DSWQLGGPSG ARAEGKGGGT | 120 |
| GLGKPAVEGG DRAPDTALRP RAGQIQVGSS SACGASENEA GVRPVPPLAG ALARAGRRRT | 180 |
| PHCRPCWLLG LGGLLQPAPR YHEAAGGRGG LHPARWGAQH RACGRRAARC ARAPAGRPRA | 240 |
| RRGLQRPAVL GRTGAQAFPL HPGERAFAGF LLAVLRPRRS RKRHAAVGGG APTLLHRAEM | 300 |
| RGTPGHRWGR ARSWKEMRCH LRANGYLCKY QFEVLCPAPR PGAASNLSYR APFQLESAAL | 360 |
| DFSPPGTEVS ALCRGQLPIS VTCIADEIGA RWDKLSGDVL CPCPGRYLRA GKCAELPNCL | 420 |
| DDLGGFACEC ATGFELGKDG RSCVTSGEGQ PTLGGTGVPT RRPPATATSP VPQRTWPIRV | 480 |
| DEKLGETPLV PEQDNSVTSI PEIPRWGSQS TMSTLQMSLQ AESKATITPS GSVISKFNST | 540 |
| TSSATPQAFD SSSAVVFIFV STAVVVLVIL TMTVLGLVKL CFHESPSSQP RKESMGPPGL | 600 |
| ESDPEPAALG SSSAHCTNNG VKVGDCDLRD RAEGALLAES PLGSSDA | |

AAD4 Protein sequence
Gene name: ERG
Unigene number: Hs.45514
Probeset Accession #: R32894
Protein Accession #: AAA52398
Signal sequence: none
Transmembrane domains: none
PFAM domains: predicted Ets-domain 294-373; SAM_PNT: 122-206
Summary: ERG2 is a sequence-specific DNA-binding protein.

| | |
|---|---|
| MIQTVPDPAA HIKEALSVVS EDQSLFECAY GTPHLAKTEM TASSSSDYGQ TSKMSPRVPQ | 60 |
| QDWLSQPPAR VTIKMECNPS QVNGSRNSPD ECSVAKGGKM VGSPDTVGMN YGSYMEEKHM | 120 |
| PPPNMTTNER RVIVPADPTL WSTDHVRQWL EWAVKEYGLP DVNILLFQNI DGKELCKMTK | 180 |
| DDFQRLTPSY NADILLSHLH YLRETPLPHL TSDDVDKALQ NSPRLMHARN TDLPYEPPRR | 240 |
| SAWTGHGHPT PQSKAAQPSP STVPKTEDQR PQLDPYQILG PTSSRLANPG SGQIQLWQFL | 300 |
| LELLSDSSNS SCITWEGTNG EFKMTDPDEV ARRWGERKSK PNMNYDKLSR ALRYYYDKNI | 360 |
| MTKVHGKRYA YKFDFHGIAQ ALQPHPPESS LYKYPSDLPY MGSYHARPQK MNFVAPHPPA | 420 |
| LPVTSSSFFA APNPYWNSPT GGIYPNTRLP TSHMPSELGT YY | 462 |

AAD5 Protein sequence
Gene name: activin A receptor type Il-like 1 (ALK-1)
Unigene number: Hs.172670
Probeset Accession #: T57112
Protein Accession #: NP_000011
Signal sequence: predicted 1-21
Transmembrane domain: predicted 119-135
PFAM domains: predicted pkinase 204-489
Summary: Type Ia membrane protein; receptor tyrosine kinase

| | |
|---|---|
| MTLGSPRKGL LMLLMALVTQ GDPVKPSRGP LVTCTCESPH CKGPTCRGAW CTVVLVREEG | 60 |
| RHPQEHRGCG NLHRELCRGR PTEFVNHYCC DSHLCNHNVS LVLEATQPPS EQPGTDGQLA | 120 |
| LILGPVLALL ALVALGVLGL WHVRRRQEKQ RGLHSELGES SLILKASEQG DTMLGDLLDS | 180 |
| DCTTGSGSGL PFLVQRTVAR QVALVECVGK GRYGEVWRGL WHGESVAVKI FSSRDEQSWF | 240 |
| RETEIYNTVL LRHDNILGFI ASDMTSRNSS TQLWLITHYH EHGSLYDFLQ RQTLEPHLAL | 300 |
| RLAVSAACGL AHLHVEIFGT QGKPAIAHRD FKSRNVLVKS NLQCCIADLG LAVMHSQGSD | 360 |
| YLDIGNNPRV GTKRYMAPEV LDEQIRTDCF ESYKWTDA FGLVLWEIAR RTIVNGIVED | 420 |
| YRPPFYDVVP NDPSFEDMKK VVCVDQQTPT IPNRLAADPV LSGLAQMMRE CWYPNPSARL | 480 |
| TALRIKKTLQ KISNSPEKPK VIQ | |

AAD8 Protein sequence
Gene name: ESTs
Unigene number: Hs.144953
Probeset Accession #: AA404418
Protein Accession #: n/a
Signal sequence: n/a
Transmembrane domains: n/a
PFAM domains: n/a
Summary: no ORF identified; possible frameshifts. Nearby to PCTAIRE
protein kinase 2 (PCTK2) on the genome (within 100 kb).
ACA2 Protein sequence
Gene name: EST
Unigene number: Hs.16450
Probeset Accession #: AA478778
Protein Accession #: n/a
Signal sequence: n/a
Transmembrane domains: n/a
PFAM domains: n/a
Summary: no ORF identified, possible frameshifts; although a match was
found to the HTGS genomic sequence, the sequence does not extend far
enough upstream to predict coding exons.
ACA4 Protein sequence
Gene name: alpha satellite junction DNA sequence
Unigene number: Hs.247946
Probeset Accession #: M21305
Protein Accession #: AAA88020
Signal sequence: none
Transmembrane domains: none
PFAM domains; none
MEWNGMAWNR IKWNGINSSG MEWNGMEWNA VQCNRNEWNE LELTGMEWNG MHLN
ACG6 Protein sequence
Gene name: intercellular adhesion molecule 2 (ICAM2)
Unigene number: Hs.83733
Probeset Accession #: M32334
Protein Accession #: NP_000864
Signal sequence: predicted 1-21
Transmembrane domain: predicted 224-248
PFAM domains: predicted 41-98, 127-197; immunoglobulin-like C2-type
domains Summary: a predicted Type Ia membrane protein; it plays a role
in cell adhesion and is the ligand for the LFA-1 protein. ICAM2 is also
called CD102.

| | |
|---|---|
| MSSFGYRTLT VALFTLICCP GSDEKVFEVH VRPKKLAVEP KGSLEVNCST TCNQPEVGGL | 60 |
| ETSLNKILLD EQAQWKHYLV SNISHDTVLQ CHFTCSGKQE SNNSNVSVYQ PPRQVILTLQ | 120 |
| PTLVAVGKSF TIECRVPTVE PLDSLTLFLF RGNETLHYET FGKAAPAPQE ATATFNSTAD | 180 |
| REDGRRNFSC LAVLDLMSRG GNIFHKHSAP KMLEIYEPVS DSQMVIIVTV VSVLLSLFVT | 240 |
| SVLLCFIFGQ HLRQQRMGTY GVRAAWRRLP QAFRP | |

ACG7 Protein sequence
Gene name: Cadherin 5, VE-cadherin (CDH5)
Unigene number: Hs.76206
Probeset Accession #: X79981
Protein Accession #: NP_001786
Signal sequence: predicted 1-27
Transmembrane domain: predicted 604-620
PFAM domains: Cadherin domains predicted 53-141, 156-249, 263-364, 377-
470, and 487-576
Summary: Likely a Type I membrane protein. Cadherins are calc. m-
dependent adhesive proteins that mediate cell-to-cell interaction. VE-
cadherin is associated with intercellular junctions.

| | |
|---|---|
| MQRLMMLLAT SGACLGLLAV AAVAAAGANP AQRDTHSLLP THRRQKRDWI WNQMHIDEEK | 60 |
| NTSLPHHVGK IKSSVSRKNA KYLLKGEYVG KVFRVDAETG DVFAIERLDR ENISEYHLTA | 120 |
| VIVDKDTGEN LETPSSFTIK VHDVNDNWPV FTHRLFNASV PESSAVGTSV ISVTAVDADD | 180 |
| PTVGDHASVM YQILKGKEYF AIDNSGRIIT ITKSLDREKQ ARYEIVVEAR DAQGLRGDSG | 240 |
| TATVLVTLQD INDNFPFFTQ TKYTFVVPED TRVGTSVGSL FVEDPDEPQN RMTKYSILRG | 300 |
| DYQDAFTIET NPAHNEGIIK PMKPLDYEYI QQYSFIVEAT DPTIDLRYMS PPAGNRAQVI | 360 |
| INITDVDEPP IFQQPFYHFQ LKENQKKPLI GTVLAMDPDA ARHSIGYSIR RTSDKGQFFR | 420 |
| VTKKGDIYNE KELDREVYPW YNLTVEAKEL DSTGTPTGKE SIVQVHIEVL DENDNAPEFA | 480 |
| KPYQPKVCEN AVHGQLVLQI SAIDKDITPR NVKFKFTLNT ENNFTLTDNH DNTANITVKY | 540 |
| GQFDREHTKV HFLPVVISDN GMPSRTGTST LTVAVCKCNE QGEFTFCEDM AAQVGVSIQA | 600 |
| VVAILLCILT ITVITLLIFL RRRLRKQARA HGKSVPEIHE QLVTYDEEGG GEMDTTSYDV | 660 |
| SVLNSVRRGG AKPPRPALDA RPSLYAQVQK PPRHAPGAHG GPGEMAANIE VKKDEADHDG | 720 |
| DGPPYDTLHI YGYEGSESIA ESLSSLGTDS SDSDVDYDFL NDWGPRFKML AELYGSDPRE | 780 |
| ELLY | |

ACG9 Protein sequence
Gene name: lysyl oxidase-like 2 (LOXL2)
Unigene number: Hs.83354
Probeset Accession #: U89942
Protein Accession #: NP_002309
Signal sequence: predicted 1-2
Transmembrane domains: none predicted
PFAM domains: scavenger receptor cysteine-rich domains predicted 68-
159, 203-238, 336-425, 439-528; Lysyl oxidase predicted 548-749.
Summary: Likely a secreted protein. Lysyl oxidase is a copper-dependent
amine oxidase that belongs to a heterogeneous family of enzymes that
oxidize primary amine substrates to reactive aldehydesm, acting on the
extracellular matrix substrates, e.g., collagen and elastin.

| | |
|---|---|
| MERPLCSHLC SCLAMLALLS PLSLAQYDSW PHYPEYFQQP APEYHQPQAP ANVAKIQLRL | 60 |
| AGQKRKHSEG RVEVYYDGQW GTVCDDDFSI HAAHVVCREL GYVEAKSWTA SSSYGKGEGP | 120 |
| IWLDNLHCTG NEATLAACTS NGWGVTDCKH TEDVGVVCSD KRIPGFKFDN SLINQIENLN | 180 |
| IQVEDIRIRA ILSTYRKRTP VMEGYVEVKE GKTWKQICDK HWTAKNSRVV CGMFGFPGER | 240 |
| TYNTKVYKMF ASRRKQRYWP FSMDCTGTEA HISSCKLGPQ VSLDPMIGNT CENGLPAVVS | 300 |
| CVPGQVFSPD GPSRFRKAYK PEQPLVRLRG GAYIGEGRVE VLKNGEWGTV CDDKWDLVSA | 360 |
| SVVCRELGFG SAKEAVTGSR LGQGIGPIHL NEIQCTGNEK SIIDCKFNAE SQGCNHEEDA | 420 |
| GVRCNTPAMG LQKKLRLNGG RNPYEGRVEV LVERNGSLVW GMVCGQNWGI VEAMVVCRQL | 480 |
| GLGFASNAFQ ETWYWHGDVN SNKVVMSGVK CSGTELSLAH CRHDGEDVAC PQGGVQYGAG | 540 |
| VACSETAPDL VLNAEMVQQT TYLEDRPMFM LQCAMEENCL SASAAQTDPT TGYRRLLRFS | 600 |
| SQIHNNGQSD FRPKNGRHAW IWHDCHRHYH SMEVFTHYDL LNLNGTKVAE GHKASFCLED | 660 |
| TECEGDIQKN YECANFGDQG ITMGCWDMYR HDIDCQWVDI TDVPPGDYLF QVVINPNFEV | 720 |
| AESDYSNNIM KCRSRYDGHR IWMYNCHIGG SFSEETEKKF EHFSGLLNNQ LSPQ | |

ACH2 Protein sequence
Gene name: TIE tyrosine-protein kinase
Unigene number: Hs.78824
Probeset Accession #: X60957
Protein Accession #: NP_005415
Signal sequence: predicted 1-21
Transmembrane domain: predicted 770-786
PFAM domains: laminin-EGF predicted 234-267; FN3 predicted 460-520, 548-
632, and 644-729; tyrosine_kinase predicted 839-1107
Summary: Likely a Type Ia membrane protein; TIE is a tyrosine-kinase
receptor with an unknown ligand; its expression is likely necessary for
normal blood vessel development.

| | |
|---|---|
| MVWRVPPFLL PILFLASHVG AAVDLTLLAN LRLTDPQRFF LTCVSGEAGA GRGSDAWGPP | 60 |
| LLLEKDDRIV RTPPGPPLRL ARNGSHQVTL RGFSKPSDLV GVFSCVGGAG ARRTRVIYVH | 120 |
| NSPGAHLLPD KVTHTVNKGD TAVLSARVHK EKQTDVIWKS NGSYFYTLDW HEAQDGRFLL | 180 |
| QLPNVQPPSS GIYSATYLEA SPLGSAFFRL IVRGCGAGRW GPGCTKECPG CLHGGVCHDH | 240 |
| DGECVCPPGF TGTRCEQACR EGRFGQSCQE QCPGISGCRG LTFCLPDPYG CSCGSGWRGS | 300 |
| QCQPCAPGH FGADCRLQCQ CQNGGTCDRF SGCVCPSGWH GVHCEKSDRI PQILNMASEL | 360 |
| EFNTMPRI NCAAAGNPFP VRGSIELRKP DGTVLLSTKA IVEPEKTTAE FEVPRLVLAD | 420 |
| SGFWECRVST SGGQDSRRFK VNVKVPPVPL AAPRLLTKQS RQLVVSPLVS FSGDGPISTV | 480 |
| RLHYRPQDST MDWSTIVVDP SENVTLMNLR PKTGYSVRVQ LSRPGEGGEG AWGPPTLMTT | 540 |
| DCPEPLLQPW LEGWHVEGTD RLRVSWSLPL VPGPLVGDGF LLRLWDGTRG QERRENVSSP | 600 |
| QARTALLTGL TPGTHYQLDV QLYHCTLLGP ASPPAHVLLP PSGPPAPRHL HAQALSDSEI | 660 |
| QLTWKHPEAL PGPISKYVVE VQVAGGAGDP LWIDVDRPEE TSTIIRGLNA STRYLFRMRA | 720 |
| SIQGLGDWSN TVEESTLGNG LQAEGPVQES RAAEEGLDQQ LILAVVGSVS ATCLTILAAL | 780 |
| LTLVCIRRSC LHRRRTFTYQ SGSGEETILQ FSSGTLTLTR RPKLQPEPLS YPVLEWEDIT | 840 |
| FEDLIGEGNF GQVIRAMIKK DGLKMNAAIK MLKEYASEND HRDFAGELEV LCKLGHHPNI | 900 |
| INLLGACKNR GYLYIAIEYA PYGNLLDFLR KSRVLETDPA FAREHGTAST LSSRQLLRFA | 960 |
| SDAANGMQYL SEKQFIHRDL AARNVLVGEN LASKIADFGL SRGEEVYVKK TMGRLPVRWM | 1020 |
| AIESLNYSVY TTKSDVWSFG VLLWEIVSLG GTPYCGMTCA ELYEKLPQGY RMEQPRNCDD | 1080 |
| EVYELMRQCW RDRPYERPPF AQIALQLGRM LEARKAYVNM SLFENFTYAG IDATAEEA | |

ACH3 Protein sequence
Gene name: placental growth factor (PGF; PlGF1; VEGF-related protein)
Unigene number: Hs.2894
Probeset Accession #: X54936
Protein Accession #: NP_002623
Signal sequence: predicted 1-21
Transmembrane domain: none predicted
PFAM domains: PDGF predicted 52-130
Summary: Likely a secreted protein; likely regulates angiogenesis by
interacting with FLT1 and FLK1.

| | |
|---|---|
| MPVMRLFPCF LQLLAGLALP AVPPQQWALS AGNGSSEVEV VPFQEVWGRS YCRALERLVD | 60 |
| VVSEYPSEVE HMFSPSCVSL LRCTGCCGDE NLHCVPVETA NVTMQLLKIR SGDRPSYVEL | 120 |
| TFSQHVRCEC RPLREKMKPE RCGDAVPRR | |

ACH4 Protein sequence
Gene name: nidogen 2 (NID2)
Unigene number: Hs.82733
Probeset Accession #: D86425
Protein Accession #: NP_031387
Signal sequence: predicted 1-30
Transmembrane domain: none predicted
PFAM domains: EGF-like_domains predicted 489-524, 764-800,
806-843, 853-891, and 897-930; thyroglobulin_repeats pre-
dicted 941-1006, and 1020-1085; LDL_receptor_repeats
predicted 1155-1197, 1199-1240, and 1242-1285. Summary: A secreted pro-
tein; NID2 likely interacts with collagens I and IV and laminin-1 to pro-
mote cell adhesion to the basement membrane.

| | |
|---|---|
| MEGDRVAGRP VLSSLPVLLL LQLLMLRAAA LHPDELFPHG ESWWDQLLQE GDDVKLSRGE | 60 |
| AGESPALLTK PDSATSTWAP TASSPLRTSP GKRSMWTMIS PPTSRPSPLF WRTSTRATAE | 120 |
| AESCTERTPP PQCWAWPPAM CALASRALRA FYPHPRLPGH LGAGRRLRGG QTRALPSGEL | 180 |
| NTFQAVLASD GSDSYALFLY PANGLQFLGT RPKESYNVQL QLPARVGFCR GEADDLKSEG | 240 |
| PYFSLTSTEQ SVKNLYQLSN LGIPGVWAFH IGSTSPLDNV RPAAVGDLSA AHSSVPLGRS | 300 |
| FSHATALESD YNEDNLDYYD VNEEEAEYLP GEPEEALNGH SSIDVSFQSK VDTKPLEESS | 360 |
| TLDPHTKEGT SLGEVGGPDL KGQVEPWDER ETRSPAPPEV DRDSLAPSWE TPPPYPENGS | 420 |
| IQPYPDGGPV PSEMDVPPAH PEEEIVLRSY PASGHTTPLS RGTYEVGLED NIGSNTEVFT | 480 |
| YNAANKETCE HNHRQCSRHA FCTDYATGFC CHCQSKFYGN GKHCLPEGAP HRVNGKVSGH | 540 |
| LHVGHTPVHF TDVDLHAYIV GNDGRAYTAI SHIPQPAAQA LLPLTPIGGL FGWLFALEKP | 600 |
| GSENGFSLAG AAFTHDMEVT FYPGEETVRI TQTAEGLDPE NYLSIKTNIQ GQVPYVPANF | 660 |
| TAHISPYKEL YHYSDSTVTS TSSRDYSLTF GAINQTWSYR IHQNITYQVC RHAPRHPSFP | 720 |
| TTQQLNVDRV FALYNDEERV LRFAVTNQIG PVKEDSDPTP VNPCYDGSHM CDTTARCHPG | 780 |
| TGVDYTCECA SGYQGDGRNC VDENECATGF HRCGPNSVCI NLPGSYRCEC RSGYEFADDR | 840 |
| HTCILITPPA NPCEDGSHTC APAGQARCVH HGGSTFSCAC LPGYAGDGHQ CTDVDECSEN | 900 |
| RCHPAATCYN TPGSFSCRCQ PGYYGDGFQC IPDSTSSLTP CEQQQRHAQA QYAYPGARFH | 960 |
| IPQCDEQGNF LPLQCHGSTG FCWCVDPDGH EVPGTQTPPG STPPHCGPSP EPTQRPPTIC | 1020 |
| ERWRENLLEH YGGTPRDDQY VPQCDDLGNF IPLQCHGKSD FCWCVDKDGR EVQGTRSQPG | 1080 |
| TTPACIPTVA PPMVRPTPRP DVTPPSVGTF LLYTQGQQIG YLPLNGTRLQ ITAAKTLLSL | 1140 |
| HGSIIVGIDY DCRERMVYWT DVAGRTISPA GLELGAEPET IVNSGLISPE GLAIDHIRRT | 1200 |
| MYWTDSVLDK IESALLDGSE RKVLFYTDLV NPRAIAVDPI RGNLYWTDWN REAPKIETSS | 1260 |
| LDGENRRILI NTDIGLPNGL TFDPFSKLLC WADAGTKKLE CTLPDGTGRR VIQNNLKYPF | 1320 |
| SIVSYADHFY HTDWRRDGVV SVNKHSGQFT DEYLPEQRSH LYGITAVYPY CPTGRK | |

ACH5 Protein sequence
Gene name: SNL (singed-like; sea urchin fascin homolog-like)
Unigene number: Hs.118400
Probeset Accession #: U03057
Protein Accession #: NP_003079
Signal sequence: none identified
Transmembrane domain: none identified
PFAM domains: none identified
Summary: a cytoplasmic, actin-bundling protein that is likely to be
involved in the assembly of actin filament bundles present in micro-
spikes, membrane ruffles, and stress fibers

| | |
|---|---|
| MTANGTAEAV QIQFGLINCG NKYLTAEAFG FKVNASASSL KKKQIWTLEQ PPDEAGSAAV | 60 |
| CLRSHLGRYL AADKDGNVTC EREVPGPDCR FLIVAHDDGR WSLQSEARRR YFGGTEDRLS | 120 |
| CFAQTVSPAE KWSVHIAMHP QVNIYSVTRK RYAHLSARPA DEIAVDRDVP WGVDSLITLA | 180 |
| FQDQRYSVQT ADHRFLRHDG RLVARPEPAT GYTLEFRSGK VAFRDCEGRY LAPSGPSGTL | 240 |
| KAGKATKVGK DELFALEQSC AQVVLQAANE RNVSTRQGMD LSANQDEETD QETFQLEIDR | 300 |
| DTKKCAFRTH TGKYWTLTAT GGVQSTASSK NASCYFDIEW RDRRITLRAS NGKFVTSKKN | 360 |
| GQLAASVETA GDSELFLMKL INRPIIVFRG EHGFIGCRKV TGTLDANRSS YDVFQLEFND | 420 |
| GAYNIKDSTG KYWTVGSDSA VTSSGDTPVD FFFEFCDYNK VAIKVGGRYL KGDHAGVLKA | 480 |
| SAETVDPASL WEY | |

ACH6 Protein sequence
Gene name: endothelial protein C receptor (EPCR; PROCR)
Unigene number: Hs.82353
Probeset Accession #: L35545
Protein Accession #: NP_006395
Signal sequence: predicted 1-17
Transmembrane domain: predicted 211-227
PFAM domains: none identified
Summary: a Type Ia membrane protein, EPCR likely binds to [thrombin]-
activated Protein C, a vitamin K-dependent serine protease zymogen
necessary for blood coagulation.

| | |
|---|---|
| MLTTLLPILL LSGWAFCSQD ASDGLQRLHM LQISYFRDPY HVWYQGNASL GGHLTHVLEG | 60 |
| PDTNTTIIQL QPLQEPESWA RTQSGLQSYL LQFEGLVRLV HQERTLAFPL TIRCFLGCEL | 120 |
| PPEGSRAHVF FEVAVNGSSF VSFRPERALW QADTQVTSGV VTFTLQQLNA YNRTRYELRE | 180 |
| FLEDTCVQYV QKHISAENTK GSQTSRSYTS LVLGVLVGGF IIAGVAVGIF LCTGGRRC | |

ACH8 Protein sequence
Gene name: melanoma adhesion molecule (MCAM; MUC18)
Unigene number: Hs.211579
Probeset Accession #: D51069
Protein Accession #: NP_006491
Signal sequence: predicted 1-17
Transmembrane domain: predicted 559-575
PFAM domains: immunoglobulin_domains predicted 264-324, and
356-410. Summary: a Type Ia membrane protein, associated with tumor
progression and the development of metastasis in human malignant mel-
anoma, and may play a role in neural crest cells during embryonic
development.

| | |
|---|---|
| MGLPRLVCAF LLAACCCCPR VAGVPGEAEQ PAPELVEVEV GSTALLKCGL SQSQGNLSHV | 60 |
| DWFSVHKEKR TLIFRVRQGQ GQSEPGEYEQ RLSLQDRGAT LALTQVTPQD ERIFLCQGKR | 120 |
| PRSQEYRIQL RVYKAPEEPN IQVNPLGIPV NSKEPEEVAT CVGRNGYPIP QVIWYKNGRP | 180 |
| LKEEKNRVHI QSSQTVESSG LYTLQSILKA QLVKEDKDAQ FYCELNYRLP SGNHMKESRE | 240 |
| VTVPVFYPTE KVWLEVEPVG MLKEGDRVEI RCLADGNPPP HFSISKQNPS TREAEEETTN | 300 |
| DNGVLVLEPA RKEHSGRYEC QAWNLDTMIS LLSEPQELLV NYVSDVRVSP AAPERQEGSS | 360 |
| LTLTCEAESS QDLEFQWLRE ETDQVLERGP VLQLHDLKRE AGGGYRCVAS VPSIPGLNRT | 420 |
| QLVKLAIFGP PWMAFKERKV WVKENMVLNL SCEASGHPRP TISWNVNGTA SEQDQDPQRV | 480 |
| LSTLNVLVTP ELLETGVECT ASNDLGKNTS ILFLELVNLT TLTPDSNTTT GLSTSTASPH | 540 |
| TRANSTSTER KLPEPESRGV VIVAVIVCIL VLAVLGAVLY FLYKKGKLPC RRSGKQEITL | 600 |
| PPSRKTELVV EVKSDKLPEE MGLLQGSSGD KRAPGDQGEK YIDLRH | |

ACH9 Protein sequence
Gene name: endothelin-1 (EDN1)
Unigene number: Hs.2271
Probeset Accession #: J05008
Protein Accession #: NP_001946
Signal sequence: predicted 1-17
Transmembrane domain: none predicted
PFAM domains: Endothelin domains predicted 59-73, and 108-129.
Summary: a secreted zymogen; the active protein is likely a 26-amino
acid peptide with potent mammalian vasoconstrictor activity; it is
necessary for normal vessel development.

| | |
|---|---|
| MDYLLMIFSL LFVACQGAPE TAVLGAELSA VGENGGEKPT PSPPWRLRRS KRCSCSSLMD | 60 |
| KECVYFCHLD IIWVNTPEHV VPYGLGSPRS KRALENLLPT KATDRENRCQ CASQKDKKCW | 120 |
| NFCQAGKELR AEDIMEKDWN NHKKGKDCSK LGKKCIYQQL VRGRKIRRSS EEHLRQTRSE | 180 |
| TMRNSVKSSF HDPKLKGKPS RERYVTHNPA HW | |

ACJ1 Protein sequence
Gene name: BMX non-receptor tyrosine kinase
Unigene number: Hs.27372
Probeset Accession #: X83107
Protein Accession #: NP_001712
Signal sequence: none identified
Transmembrane domain: none identified
PFAM domains: plektrin_homology_domain predicted 6-111;
SH2_domain predicted 294-383; protein_kinase_domain
predicted 417-663 Summary: a cytoplasmic protein, it likely plays a
role in the growth and differentiation of hematopoietic cells; it is
known to also be expressed in endothelial cells.

| | |
|---|---|
| MDTKSILEEL LLKRSQQKKK MSPNNYKERL FVLTKTNLSY YEYDKMKRGS RKGSIEIKKI | 60 |
| RCVEKVNLEE QTPVERQYPF QIVYKDGLLY VYASNEESRS QWLKALQKEI RGNPHLLVKY | 120 |
| HSGFFVDGKF LCCQQSCKAA PGCTLWEAYA NLHTAVNEEK HRVPTFPDRV LKIPRAVPVL | 180 |
| KMDAPSSSTT LAQYDNESKK NYGSQPPSSS TSLAQYDSNS KKIYGSQPNF NMQYIPREDF | 240 |
| PDWWQVRKLK SSSSSEDVAS SNQKERNVNH TTSKISWEFP ESSSSEEEEN LDDYDWFAGN | 300 |
| ISRSQSEQLL RQKGKEGAFM VRNSSQVGMY TVSLFSKAVN DKKGTVKHYH VHTNAENKLY | 360 |
| LAENYCFDSI PKLIHYHQHN SAGMITRLRH PVSTKANKVP DSVSLGNGIW ELKREEITLL | 420 |
| KELGSGQFGV VQLGKWKGQY DVAVKMIKEG SMSEDEFFQE AQTMMKLSHP KLVKFYGVCS | 480 |
| KEYPIYIVTE YISNGCLLNY LRSHGKGLEP SQLLEMCYDV CEGMAFLESH QFIHRDLAAR | 540 |
| NCLVDRDLCV KVSDFGMTRY VLDDQYVSSV GTKFPVKWSA PEVFHYFKYS SKSDVWAFGI | 600 |
| LMWEVFSLGK QPYDLYDNSQ VVLKVSQGHR LYRPHLASDT IYQIMYSCWH ELPEKRPTFQ | 660 |
| QLLSSIEPLR EKDKH | |

ACJ4 Protein sequence
Gene name: prostaglandin G/H synthase 2 (COX-2; PGES-2)
Unigene number: Hs.196384
Probeset Accession #: D28235
Protein Accession #: NP_000954
Signal sequence: predicted 1-17
Transmembrane domain: none identified
PFAM domains: EGF-like_domain predicted 18-55.
Summary: a microsomal enzyme; COX-2 is the therapeutic target of the
nonsteroidal anti-inflammatory drugs (NSAIDs), such as aspirin.

| | |
|---|---|
| MLARALLLCA VLALSHTANP CCSHPCQNRG VCMSVGFDQY KCDCTRTGFY GENCSTPEFL | 60 |
| TRIKLFLKPT PNTVHYILTH FKGFWNVVNN IPFLRNAIMS YVLTSRSHLI DSPPTYNADY | 120 |
| GYKSWEAFSN LSYYTRALPP VPDDCPTPLG VKGKKQLPDS NEIVEKLLLR RKFIPDPQGS | 180 |
| NMMFAFFAQH FTHQFFKTDH KRGPAFTNGL GHGVDLNHIY GETLARQRKL RLFKDGKMKY | 240 |
| QIIDGEMYPP TVKDTQAEMI YPPQVPEHLR FAVGQEVFGL VPGLMMYATI WLREHNRVCD | 300 |
| VLKQEHPEWG DEQLFQTSRL ILIGETIKIV IEDYVQHLSG YHFKLKFDPE LLFNKQFQYQ | 360 |
| NRIAAEFNTL YHWHPLLPDT FQIHDQKYNY QQFIYNNSIL LEHGITQFVE SFTRQIAGRV | 420 |
| AGGRNVPPAV QKVSQASIDQ SRQMKYQSFN EYRKRFMLKP YESFEELTGE KEMSAELEAL | 480 |
| YGDIDAVELY PALLVEKPRP DAIFGETMVE VGAPFSLKGL MGNVICSPAY WKPSTFGGEV | 540 |
| GFQIINTASI QSLICNNVKG CPFTSFSVPD PELIKTVTIN ASSSRSGLDD INPTVLLKER | 600 |
| STEL | |

ACJ6 Protein sequence
Gene name: SEC14-like-1
Unigene number: Hs.75232
Probeset Accession #: D67029
Protein Accession #: NP_002994
Signal sequence: none identified
Transmembrane domain: none identified
PFAM domains: none identified
Summary: a cytoplasmic protein

| | |
|---|---|
| MVQKYQSPVR VYKYPFELIM AAYERRFPTC PLIPMFVGSD TVSEFKSEDG AIHVIERRCK | 60 |
| LDVDAPRLLK KIAGVDYVYF VQKNSLNSRE RTLHIEAYNE TFSNRVIINE HCCYTVHPEN | 120 |
| EDWTCFEQSA SLDIKSFFGF ESTVEKIAMK QYTSNIKKGK EIIEYYLRQL EEEGITFVPR | 180 |
| WSPPSITPSS ETSSSSSKKQ AASMAVVIPE AALKEGLSGD ALSSPSAPEP VVGTPDDKLD | 240 |
| ADHIKRYLGD LTPLQESCLI RLRQWLQETH KGKIPKDEHI LRFLRARDFN IDKAREIMCQ | 300 |
| SLTWRKQHQV DYILETWTPP QVLQDYYAGG WHHHDKDGRP LYVLRLGQMD TKGLVRALGE | 360 |
| EALLRYVLSV NEERLRRCEE NTKVFGRPIS SWTCLVDLEG LNMRHLWRPG VKALLRIIEV | 420 |
| VEANYPETLG RLLILRAPRV FPVLWTLVSP FIDDNTRRKF LIYAGNDYQG PGGLLDYIDK | 480 |
| EIIPDFLSGE CMCEVPEGGL VPKSLYRTAE ELENEDLKLW TETIYQSASV FKGAPHEILI | 540 |
| QIVDASSVIT WDFDVCKGDI VFNIYHSKRS PQPPKKDSLG AHSITSPGGN NVQLIDKVWQ | 600 |
| LGRDYSMVES PLICKEGESV QGSHVTRWPG FYILQWKFHS MPACAASSLP RVDDVLASLQ | 660 |
| VSSHKCKVMY YTEVIGSEDF RGSMTSLESS HSGFSQLSAA TTSSSQSHSS SMISR | |

ACJ8 Protein sequence
Gene name: intercellular adhesion molecule 1 (ICAM1; CD54)
Unigene number: Hs.168383
Probeset Accession #: M24283
Protein Accession #: NP_000192
Signal sequence: predicted 1-27
Transmembrane domain: predicted 481-497
PFAM domains: immunoglobulin_domains predicted 128-188, and
325-373. Summary: a Type 1a membrane protein; ICAM1 is typically
expressed on endothelial cells and cells of the immune system; ICAM2.
binds to integrins of type CD11a/CD18, or CD11b/CD18; ICAM1 is also ex-
ploited by Rhinovirus as a receptor.

| | |
|---|---|
| MAPSSPRPAL PALLVLLGAL FPGPGNAQTS VSPSKVILPR GGSVLVTCST SCDQPKLLGI | 60 |
| ETPLPKKELL LPGNNRKVYE LSNVQEDSQP MCYSNCPDGQ STAKTFLTVY WTPERVELAP | 120 |
| LPSWQPVGKN LTLRCQVEGG APRANLTVVL LRGEKELKRE PAVGEPAEVT TTVLVRRDHH | 180 |
| GANFSCRTEL DLRPQGLELF ENTSAPYQLQ TFVLPATPPQ LVSPRVLEVD TQGTVVCSLD | 240 |
| GLFPVSEAQV HLALGDQRLN PTVTYGNDSF SAKASVSVTA EDEGTQRLTC AVILGNQSQE | 300 |
| TLQTVTIYSF PAPNVILTKP EVSEGTEVTV KCEAHPRAKV TLNGVPAQPL GPRAQLLLKA | 360 |
| TPEDNGRSFS CSATLEVAGQ LIHKNQTREL RVLYGPRLDE RDCPGNWTWP ENSQQTPMCQ | 420 |
| AWGNPLPELK CLKDGTFPLP IGESVTVTRD LEGTYLCRAR STQGEVTREV TVNVLSPRYE | 480 |
| IVIITVVAAA VIMGTAGLST YLYNRQRKIK KYRLQQAQKG TPMKPNTQAT PP | |

ACK3 Protein sequence
Gene name: angiopoietin 1 receptor (TIE-2; TEK)
Unigene number: Hs.89640
Probeset Accession #: L06139
Protein Accession #: NP_000450
Signal sequence: predicted 1-18
Transmembrane domain: predicted 746-770
PFAM domains: immunoglobulin_domains predicted 44-102, 370-424;
EGF_like_domains predicted 210-252, 254-299, and 301-
341; FN3_domains predicted 444-536, 541-634, and 638-732; pro-
tein_kinase_domain predicted 824-1096.
Summary: a Type 1a membrane protein; it is expressed almost exclusively
in endothelial cells in mice, rats, and humans; the ligand for this re-
ceptor is angiopoietin-1; defects in TEK are associated with inherited
venous malformations; the TEK signaling pathway appears to be critical
for endothelial cell-smooth muscle cell communication in venous morpho-
genesis.

| | |
|---|---|
| MDSLASLVLC GVSLLLSGTV EGAMDLILIN SLPLVSDAET SLTCIASGWR PEEPITIGRD | 60 |
| FEALMNQHQD PLEVTQDVTR EWAKKVVWKR EKASKINGAY FCEGRVRGEA IRIRTMKMRQ | 120 |
| QASFLPATLT MTVDKGDNVN ISFKKVLIKE EDAVIYKNGS FIHSVPRHEV PDILEVELPH | 180 |
| AQPQDAGVYS ARYIGGNLFT SAFTRLIVRR CEAQKWGPEC NHLCTACMNN GVCHEDTGEC | 240 |
| ICPPGFMGRT CEKACELHTF GRTCKERCSG QEGCKSYVFC LPDPYGCSCA TGWKGLQCNE | 300 |
| ACHPGFYGPD CKLRCSCNNG EMCDRFQGCL CSPGWQGLQC EREGIPRMTP KIVDLPDHIE | 360 |
| VNSGKFNPIC KASGWPLPTN EEMTLVKPDG TVLHPKDFNH TDHFSVAIFT IHRILPPDSG | 420 |
| VWVCSVNTVA GMVEKPFNIS VKVLPKPLNA PNVIDTGHNF AVINISSEPY FGDGPIKSKK | 480 |
| LLYKPVNHYE AWQHIQVTNE IVTLNYLEPR TEYELCVQLV RRGEGGEGHP GPVRRFTTAS | 540 |
| IGLPPPRGLN LLPKSQTTLN LTWQPIFPSS EDDFYVEVER RSVQKSDQQN IKVPGNLTSV | 600 |
| LLNNLHPREQ YVVRARVNTK AQGEWSEDLT AWTLSDILPP QPENIKISNI THSSAVISWT | 660 |
| ILDGYSISSI TIRYKVQGKN EDQHVDVKIK NATIIQYQLK GLEPETAYQV DIFAENNIGS | 720 |
| SNPAFSHELV TLPESQAPAD LGGGKMLLIA ILGSAGMTCL TVLLAFLIIL QLKRANVQRR | 780 |
| MAQAFQNVRE EPAVQFNSGT LALNRKVKNN PDPTIYPVLD WNDIKFQDVI GEGNFGQVLK | 840 |
| ARIKKDGLRM DAAIKRMKEY ASKDDHRDFA GELEVLCKLG HHPNIINLLG ACEHRGYLYL | 900 |
| AIEYAPHGNL LDFLRKSRVL ETDPAFAIAN STASTLSSQQ LLHFAADVAR GMDYLSQKQF | 960 |
| IHRDLAARNI LVGENYVAKI ADFGLSRGQE VYVKKTMGRL PVRWMAIESL NYSVYTTNSD | 1020 |
| VWSYGVLLWE IVSLGGTPYC GMTCAELYEK LPQGYRLEKP LNCDDEVYDL MRQCWREKPY | 1080 |
| ERPSFAQILV SLNRMLEERK TYVNTTLYEK FTYAGIDCSA EEAA | |

PZA6 Protein sequence
Gene name: prostate differentiation factor (PLAB; MIC-1)
Unigene number: Hs.116577
Probeset Accession #: AB000584
Protein Accession #: NP_004855
Signal sequence: predicted 1-29
Transmembrane domain: none identified
PFAM domains: TGF-beta _domain predicted 211-308.
Summary: a secreted protein; its exact function is unclear; it inhibits
proliferation of primitive hematopoietic progenitors; it inhibits acti-
vation of macrophages; it is highly expressed in placenta and in serum
of pregnant women; it may promote fetal survival by suppressing the pro-
duction of maternally-derived proinflammatory cytokines within the
uterus.

| | |
|---|---|
| MPGQELRTVN GSQMLLVLLV LSWLPHGGAL SLAEASRASF PGPSELHSED SRFRELRKRY | 60 |
| EDLLTRLRAN QSWEDSNTDL VPAPAVPILT PEVRLGSGGH LHLRISRAAL PEGLPEASRL | 120 |
| HRALFRLSPT ASRSWDVTRP LRRQLSLARP QAPALHLRLS PPPSQSDQLL AESSSARPQL | 180 |
| ELHLRPQAAR GRRRARARNG DDCPLGPGRC CRLHTVRASL EDLGWADWVL SPREVQVTNC | 240 |
| IGACPSQFRA ANMHAQIKTS LHRLKPDTEP APCCVPASYN PMVLIQKTDT GVSLQTYDDL | 300 |
| LAKDCHCI | |

AAD2 Protein sequence:
Gene name: Thrombospondin-1
Unigene number: Hs.87409
Probeset Accession #: AA232645
Protein Accession #: NP_003237.1
Signal sequence: predicted 1-18 (first underlined sequence)
Transmembrane Domain: none identified
Summary: Thrombospondin is a large modular glycoprotein component of the
extracellular matrix and contains a variety of distinct domains, includ-
ing three repeating subunits (types I, II, and III) that share homology
to an assortment of other proteins.

| | |
|---|---|
| MGLAWGLGVL FLMRVCGTNR IPESGGDNSV FDIFELTGAA RKGSGRRLVK GPDPSSPAFR | 60 |
| IEDANLIPPV PDDKFQDLVD AVRAEKGFLL LASLRQMKKT RGTLLALERK DHSGQVFSVV | 120 |
| SNGKAGTLDL SLTVQGKQHV VSVEEALLAT GQWKSITLFV QEDRAQLYID CEKMENAELD | 180 |
| VPIQSVFTRD LASIARLRIA KGGVNDNFQG VLQNVRFVFG TTPEDILRNK GCSSSTSVLL | 240 |
| TLDNNVVNGS SPAIRTNYIG HKTKDLQAIC GISCDELSSM VLELRGLRTI VTTLQDSIRK | 300 |
| VTEENKELAN ELRRPPLCYH NGVQYRNNEE WTVDSCTECH CQNSVTICKK VSCPIMPCSN | 360 |
| ATVPDGECCP RCWPSDSADD GWSPWSEWTS CSTSCGNGIQ QRGRSCDSLN NRCEGSSVQT | 420 |
| RTCHIQECDK RFKQDGGWSH WSPWSSCSVT CGDGVITRIR LCNSPSPQMN GKPCEGEARE | 480 |
| TKACKKDACP INGGWGPWSP WDICSVTCGG GVQKRSRLCN NPAPQFGGKD CVGDVTENQI | 540 |
| CNKQDCPIDG CLSNPCFAGV KCTSYPDGSW KCGACPPGYS GNGIQCTDVD ECKEVPDACF | 600 |
| NHNGEHRCEN TDPGYNCLPC PPRFTGSQPF GQGVEHATAN KQVCKPRNPC TDGTHDCNKN | 660 |
| AKCNYLGHYS DPMYRCECKP GYAGNGIICG EDTDLDGWPN ENLVCVANAT YHCKKDNCPN | 720 |
| LPNSGQEDYD KDGIGDACDD DDDNDKIPDD RDNCPFHYNP AQYDYDRDDV GDRCDNCPYN | 780 |
| HNPDQADTDN NGEGDACAAD IDGDGILNER DNCQYVYNVD QRDTDMDGVG DQCDNCPLEH | 840 |
| NPDQLDSDSD RIGDTCDNNQ DIDEDGHQNN LDNCPYVPNA NQADHDKDGK GDACDHDDDN | 900 |
| DGIPDDKDNC RLVPNPDQKD SDGDGRGDAC KDDFDHDSVP DIDDICPENV DISETDFRRF | 960 |
| QMIPLDPKGT SQNDPNWVVR HQGKELVQTV NCDPGLAVGY DEFNAVDFSG TFFINTERDD | 1020 |
| DYAGFVFGYQ SSSRFYVVMW KQVTQSYWDT NPTRAQGYSG LSVKVVNSTT GPGEHLRNAL | 1080 |
| WHTGNTPGQV RTLWHDPRHI GWKDFTAYRW RLSHRPKTGF IRVVMYEGKK IMADSGPIYD | 1140 |
| KTYAGGRLGL FVFSQEMVFF SDLKYECRDP | |

AAD9 protein sequence
Gene name: LIM homeobox protein cofactor (CLIM-1)
Unigene number: Hs.4980
Probeset Accession #: F13782
Protein Accession #: AAC83552
Pfam: LIM bind
Transmembrane Domain: none identifed
Summary: The LIM homeodomain (LIM-HD) proteins, which contain two tan-
dem LIM domains followed by a homeodomain, are critical transcriptional
regulators of embryonic development. The LIM domain is a conserved
cysteine-rich zinc-binding motif found in LIM-HD proteins, cytoskeletal
components, LIM kinases, and other proteins. LIM domains are protein-pro-
tein interaction motifs, can inhibit binding of LIM-HD proteins to DNA,
and can negatively regulate LIM-HD protein function.

| | |
|---|---|
| MSSTPHDPFY SSPFGPFYRR HTPYMVQPEY RIYEMNKRLQ SRTEDSDNLW WDAFATEFFE | 60 |
| DDATLTLSFC LEDGPKRYTI GRTLIPRYFS TVFEGGVTDL YYILKHSKES YHNSSITVDC | 120 |
| DQCTMVTQHG KPMFTKVCTE GRLILEFTFD DLMRIKTWHF TIRQYRELVP RSILANHAQD | 180 |
| PQVLDQLSKN ITRMGLTNFT LNYLRLCVIL EPMQELMSRH KTYNLSPRDC LKTCLFQKWQ | 240 |
| RMVAPPAEPT RQPTTKRRKR KNSTSSTSNS SAGNNANSTG SKKKTTAANL SLSSQVPDVM | 300 |
| VVGEPTLMGG EFGDEDERLI TRLENTQYDA ANGMDDEEDF NNSPALGNNS PWNSKPPATQ | 360 |
| ETKSENPPPQ ASQ | |

AAE1 protein seanence
Gene name: guanine nucleotide binding protein 11
Unigene number: Hs.83381
Probeset Accession #: U31384
Protein Accession #: NP_004117.1
Pfam: G-gamma; CAAX motif (farnesylation site) prediction underlined
Summary: The G gamma proteins are a component of the trimeric G-proteins
that interact with cell surface receptors. The G protein beta and gamma
subunits directly regulate the activities of various enzymes and ion
channels after receptor ligation. Unlike most of the other known gamma
subunits, gamma 11 is modified by a farnesyl group and is not capable
of interacting with beta 2.

| | |
|---|---|
| MPALHIEDLP EKEKLIG4EVE QLRKEVKLQR QQVSKCSEEI KNYIEERSGE DPLVKGIPED | 60 |
| KNPFKEKGSC VIS | |

AAE2 protein sequence
Gene name: Transcription factor 4 (Immunoglobulin transcription factor
2) (ITF-2) CSL3-3 Enhancer factor 2) (SEF-2) Unigene number: Hs.289068
Probeset Accession #: M74719 Protein Accession #: NP_003190.1
Pfam: HLH domain prediction underlined Summary: Transcription factor 4
is a helix-loop-helix (HLH) protein which belongs to a family of nu-
clear proteins, designated SL3-3 enhancer factors 2 (SEF2), that inter-
act with an Ephrussi box-like motif within the glucocorticoid response
element in the enhancer of the murine leukemia virus SL3-3. Various cell
types display differences both in the sets of SEF2-DNA complexes formed
and in their amounts. Molecular analysis of cDNA clones show the exist-
ence of multiple related mRNA species containing alternative coding
regions, which are most probably a result of differential splicing.

| | |
|---|---|
| MHHQQRMAAL GTDKELSDLL DFSAMFSPPV SSGKNGPTSL ASGHFTGSNV EDRSSSGSWG | 60 |
| NGGHPSPSRN YGDGTPYDHM TSRDLGSHDN LSPPFVNSRI QSKTERGSYS SYGRESNLQG | 120 |
| CHQQSLLGGD MDMGNPGTLS PTKPGSQYYQ YSSNNPRRRP LHSSAMEVQT KKVRKVPPGL | 180 |
| PSSVYAPSAS TADYNRDSPG YPSSKPATST FPSSFFMQDG HHSSDPWSSS SGMNQPGYAG | 240 |
| MLGNSSHIPQ SSSYCSLEPH ERLSYPSHSS ADINSSLPPM STFHRSGTNH YSTSSCTPPA | 300 |
| NGTDSIMANR GSGAAGSSQT GDALGKALAS IYSPDHTNNS FSSNPSTPVG SPPSLSAGTA | 360 |
| VWSRNGGQAS SSPNYEGPLH SLQSRIEDRL ERLDDAIHVL RNHAVGPSTA MGGHGDMHG | 420 |
| IIGPSHNGAM GGLGSGYGTG LLSANRHSLM VGTHREDGVA LRGSHSLLPN QVPVPQLPVQ | 480 |
| SATSPDLNPP QDPYRGMPPG LQGQSVSSGS SEIKSDDEGD ENLQDTKSSE DKKLDDDKKD | 540 |
| IKSITSNNDD EDLTPEQKAE REKERRMANN ARERLRVRDI NEAFKELGRM VQLHLKSDKP | 600 |
| QTKLLILHQA VAVILSLEQQ VRERNLNPKA ACLKRREEEK VSSEPPPLSL AGPHPGMGDA | 660 |
| SNHMGQM | |

AAE4 protein sequence
Gene name: phosphatidyicholine 2-acylhydrolase
Unigene number: Hs.211587
Probeset Accession #: M68874
Protein Accession #: AAA60105.1
Pfam: PLA2 B, C2 domain prediction underlined
Summary: Phospholipases A2 (PLA2s) play a key role in inflammatory pro-
cesses through production of precursors of eicosanoids and platelet-acti-
vating factor. PLA2 is a 100 kd protein that contains a structural
element homologous to the C2 region of protein kinase C.

| | |
|---|---|
| MSFIDPYQHI IVEHQYSHKF TVVVLRATKV TKGAFGDMLD TPDPYVELFI STTPDSRKRT | 60 |
| RHFNNDINPV WNETFEFILD PNQENVLEIT LMDANYVMDE TLGTATFTVS SMKVGEKKEV | 120 |
| PFIFNQVTEM VLEMSLEVCS CPDLRFSMAL CDQEKTFRQQ RKEHIRESMK KLLGPKNSEG | 180 |
| LHSARDVPVV AILGSGGGFR AMVGFSGVMK ALYESGILDC ATYVAGLSGS TWYMSTLYSH | 240 |
| PDFPEKGPEE INEELMKNVS HNPLLLLTPQ KVKRYVESLW KKKSSGQPVT FTDIFGMLIG | 300 |
| ETLIHNRMNT TLSSLKEKVN TAQCPLPLFT CLHVKPDVSE LMFADWVEFS PYEIGMAKYG | 360 |
| TFMAPDLFGS KFFMGTVVKK YEENPLHFLM GVWGSAFSIL FNRVLGVSGS QSRGSTMEEE | 420 |
| LENITTKHIV SNDSSDSDDE SHEPKGTENE DAGSDYQSDN QASWIHRMIM ALVSDSALFN | 480 |
| TREGRAGKVH NFMLGLNLNT SYPLSPLSDF ATQDSFDDDE LDAAVADPDE FERIYEPLDV | 540 |
| KSKKIHVVDS GLTFNLPYPL ILRPQRGVDL IISFDFSARP SDSSPPFKEL LLAEKWAKMN | 600 |
| KLPFPKIDPY VFDREGLKEC YVFKPKNPDM EKDCPTIIHF VLANINFRKY KAPGVPRETE | 660 |
| EEKEIADFDI FDDPESPFST FNFQYPNQAF KRLHDLMHFN TLNNIDVIKE AMVESIEYRR | 720 |
| QNPSRCSVSL SNVEARRFFN KEFLSKPKA | |

ACA1 protein sequence
Gene name: tissue factor pathway inhibitor 2 TFPI2, placental protein 5
(PP5)
Unigene number: Hs.78045
Probeset Accession #: D29992
Protein Accession #: BAA06272.1
Pfam: Kunitz BPTI
Signal sequence: underlined
Summary: ACA1 is a serine proteinase inhibitor that was originally puri-
fied from conditioned medium of the human glioblastoma cell line T98G.
ACA1 is identical to placental protein 5 (PP5) and TFPI2, a placenta-
derived glycoprotein with serine proteinase inhibitor activity. PP5 be-
longs to the Kunitz-type serine proteinase inhibitor family, having
three putative Kunitz-type inhibitor domains.

| | |
|---|---|
| MDPARPLGLS ILLLFLTEAA LGDAAQEPTG NNAEICLLPL DYGPCRALLL RYYYDRYTQS | 60 |
| CRQFLYGGCE GNANNFYTWE ACDDACWRIE KVPKVCRLQV SVDDQCEGST EKYFFNLSSM | 120 |
| TCEKFFSGGC HRNRIENRFP DEATCMGFCA PKKIPSFCYS PKDEGLCSAN VTRYYFNPRY | 180 |
| RTCDAFTYTG CGGNDNNFVS REDCKRACAK ALKKKKKMPK LRFASRIRKI RKKQF | |

ACB8 protein sequence
Gene name: myosin X
Unigene number: Hs.61638
Probeset Accession #: N77151
Protein Accession #: NP_036466
Pfam: myosin head, IQ (calmodulin binding motif), PH, MyTH4
Summary: Myosins are molecular motors that move along filamentous actin.
Seven classes of myosin are expressed in vertebrates: conventional
myosin, or myosin-II, as well as the 6 unconventional myosin classes-I,
-V, -VI, -VII, -IX, and -X.

| | |
|---|---|
| MDNFFTEGTR VWLRENGQHF PSTVNSCAEG IVVFRTDYGQ VFTYKQSTIT HQKVTAMHPT | 60 |
| NEEGVDDMAS LTELHGGSIM YNLFQRYKRN QIYTYIGSIL ASVNPYQPIA GLYEPATMEQ | 120 |
| YSRRHLGELP PHIFAIANEC YRCLWKRYDN QCILISGESG AGKTESTKLI LKFLSVISQQ | 180 |
| SLELSLKEKT SCVERAILES SPIMEAFGNA KTVYNNNSSR FGKFVQLNIC QKGNIQGGRI | 240 |
| VDYLLEKNRV VRQNPGERNY HIFYALLAGL EHEEREEFYL STPENYHYLN QSGCVEDKTI | 300 |
| SDQESFREVI TANDVMQFSK EEVREVSRLL AGILHLGNIE FITAGGAQVS FKTALGRSAE | 360 |
| LLGLDPTQLT DALTQRSMFL RGEEILTPLN VQQAVDSRDS LAMALYACCF EWVIKKINSR | 420 |
| IKGNEDFKSI GILDIFGFEN FEVNHFEQFN INYANEKLQE YFNKHIFSLE QLEYSREGLV | 460 |
| WEDIDWIDNG ECLDLIEKKL GLLALINEES HFPQATDSTL LEKLHSQHAN NHFYVKPRVA | 540 |
| VNNFGVKHYA GEVQYDVRGI LEKNRDTFRD DLLNLLRESR FDFIYDLFEH VSSRNNQDTL | 600 |
| KCGSKHRRPT VSSQFKDSLH SLMATLSSSN PFFVRCIKPN MQKMPDQFDQ AVVLNQLRYS | 660 |
| GMLETVRIRK AGYAVRRPFQ DFYKRYKVLM RNLALPEDVR GKCTSLLQLY DASNSEWQLG | 720 |
| KTKVFLRESL EQKLEKRREE EVSHAAMVIR AHVLGFLARK QYRKVLYCVV IIQKNYRAFL | 780 |
| LRRRFLHLKK AAIVFQKQLR GQIARRVYRQ LLAEKREQEE KKKQEEEEKK KREEEERERE | 840 |
| RERREAELRA QQEEETRKQQ ELEALQKSQK EAELTRELEK QKENKQVEEI LRLEKEIEDL | 900 |
| QRMKEQQELS LTEASLQKLQ ERRDQELRRL EEEACRAAQE FLESLNFDEI DECVRNIERS | 960 |
| LSVGSEFSSE LAESACEEKP NFNFSQPYPE EEVDEGFEAD DDAFKDSPNP SEHGHSDQRT | 1020 |
| SGIRTSDDSS EEDPYNNDTV VPTSPSADST VLLAPSVQDS GSLHNSSSGE STYCMPQNAG | 1080 |
| DLPSPDGDYD YDQDDYEDGA ITSGSSVTFS NSYGSQWSPD YRCSVGTYNS SGAYRFSSEG | 1140 |
| AQSSFEDSEE DFDSRFDTDD ELSYRRDSVY SCVTLPYFHS FLYMKGGLMN SWKRRWCVLK | 1200 |
| DETFLWFRSK QEALKQGWLH KKGGGSSTLS RRNWKKRWFV LRQSKLMYFE NDSEEKLKGT | 1260 |
| VEVRTAKEII DNTTKENGID IIMADRTFHL IAESPEDASQ WFSVLSQVHA STDQEIQEMH | 1320 |
| DEQANPQNAV GTLDVGLIDS VCASDSPDRP NSFVIITANR VLHCNADTPE EMHHWITLLQ | 1380 |
| RSKGDTRVEG QEFIVRGWLH KEVKNSPKMS SLKLKKRWFV LTHNSLDYYK SSEKNALKLG | 1440 |
| TLVLNSLCSV VPPDEKIFKE TGYWNVTVYG RKHCYRLYTK LLNEATRWSS AIQNVTDTKA | 1500 |
| PIDTPTQQLI QDIKENCLNS DVVEQIYKRN PILRYTHHPL HSPLLPLPYG DINLNLLKDK | 1560 |
| GYTTLQDEAI KIFNSLQQLE SMSDPIPIIQ GILQTGHDLR PLRDELYCQL IKQTNKVPHP | 1620 |
| GSVGNLYSWQ ILTCLSCTFL PSRGILKYLK FHLKRIREQF PGTEMEKYAL FTYESLKKTK | 1680 |
| CREFVPSRDE IEALIHRQEM TSTVYCHGGG SCKITINSHT TAGEVVEKLI RGLAMEDSRN | 1740 |
| MFALFEYNGH VDKAIESRTV VADVLAKFEK LAATSEVGDL PWKFYFKLYC FLDTDNVPKD | 1800 |
| SVEFAFMFEQ AHEAVIHGHH PAPEENLQVL AALRLQYLQG DYTLHAAIPP LEEVYSLQRL | 1860 |
| KARISQSTKT FTPCERLEKR RTSFLEGTLR RSFRTGSVVR QKVEEEQMLD MWIKEEVSSA | 1920 |
| RASIIDKWRK FQGNNQEQAM AKYMALIKEW PGYGSTLFDV ECKEGGFPQE LWLGVSADAV | 1980 |
| SVYKRGEGRP LEVFQYEHIL SFGAPLANTY KIVVDERELL FETSEVVDVA KLMKAYISMI | 2040 |
| VKKRYSTTRS ASSQGSSR | |

ACC3 protein sequence
Gene name: calcitonin receptor-like (CALCRL)
Unigene number: Hs.152175
Probeset Accession #: L76380
Protein Accession #: NP_005786.1
Pfam: 7TM 2 (7 transmembrane receptor (Secretin family))
Transmembrane domains: predictions underlined
Signal sequence: first underlined region
Summary: Calcitonin gene-related peptide (CGRP) is a neuropeptide with
diverse biological effects including potent vasodilator activity. The
human CGRP1 receptor shares significant peptide sequence homology with
the human calcitonin receptor, a member of the G-protein-coupled recept-
or superfamily. Stable expression in 293 (HEK 293) cells produces spec-
ific, high affinity binding sites for CGRP. Exposure of these cells to
CGRP results in a 60-fold increase in cAMP production.

| | |
|---|---|
| MEKKCTLYFL VLLPFFMILV TAELEESPED SIQLGVTRNK IMTAQYECYQ KIMQDPIQQA | 60 |
| EGVYCNRTWD GWLCWNDVAA GTESMQLCPD YFQDFDPSEK VTKICDQDGN WFRHPASNRT | 120 |
| WTNYTQCNVN THEKVKTALN LFYLTIIGHG LSIASLLISL GIFFYFKSLS CQRITLHKNL | 180 |
| FFSFVCNSVV TIIHLTAVAN NQALVATNPV SCKVSQFIHL YLMGCNYFWM LCEGIYLHTL | 240 |
| IVVAVFAEKQ HLMWYYFLGW GFPLIPACIH AIARSLYYND NCWISSDTHL LYIIHGPICA | 300 |
| ALLVNLFFLL NIVRVLITKL KVTHQAESNL YMKAVRATLI LVPLLGIEFV LIPWRPEGKI | 360 |
| AEEVYDYIMH ILMHFQGLLV STIFCFFNGE VQAILRRNWN QYKIQFGNSF SNSEALRSAS | 420 |
| YTVSTISDGP GYSHDCPSEH L&GKSIHDIE NVLLKPENLY N | |

ACC5 protein sequence
Gene name: Selectin E (endothelial adhesion molecule 1)
Unigene number: Hs.89546
Probeset Accession #: M24736
Protein Accession #: NP_000441.1
Pfam: lectin c, EGF like domain, sushi (SCR domain)
Signal sequence: first underlined region
Transmembrane domain: second underlined region
Summary: Focal adhesion of leukocytes to the blood vessel lining is a
key step in inflammation and certain vascular disease processes. Endo-
thelial leukocyte adhesion molecule-1 (ELAM-1), a cell surface glyco-
protein expressed by cytokine-activated endothelial, mediates the ad-
hesion of blood neutrophils. The primary sequence of ELAM-1 predicts
an amino-terminal lectin-like domain, an EGF domain, and six tandem re-
petitive motifs (about 60 amino acids each) related to those found
in complement regulatory proteins. A similar domain structure is also
found in the MEL-14 lymphocyte cell surface homing receptor, and in gran-
ule-membrane protein 140, a membrane glycoprotein of platelet and endo-
thelial secretory granules that can be rapidly mobilized (less than 5
minutes) to the cell surface by thrombin and other stimuli. Thus, ELAM-1
may be a member of a nascent gene family of cell surface molecules in-
volved in the regulation of inflammatory and immunological events at the
interface of vessel wall and blood.

| | |
|---|---|
| MIASQFLSAL TLVLLIKESG AWSYNTSTEA MTYDEASAYC QQRYTHLVAI QNKEEIEYLN | 60 |
| SILSYSPSYY WIGIRKVNNV WVWVGTQKPL TEEAKNWAPG EPNNRQKDED CVEIYIKREK | 120 |
| DVGMWNDERC SKKKLALCYT AACTNTSCSG HGECVETINN YTCKCDPGFS GLKCEQIVNC | 180 |
| TALESPEHGS LVCSHPLGNF SYNSSCSISC DRGYLPSSME TMQCMSSGEW SAPIPACNVV | 240 |
| ECDAVTNPAN GFVECFQNPG SFPWNTTCTF DCEEGFELMG AQSLQCTSSG NWDNEKPTCK | 300 |
| AVTCRAVRQP QNGSVRCSHS PAGEFTFKSS CNFTCEEGFM LQGPAQVECT TQGQWTQQIP | 360 |
| VCEAFQCTAL SNPERGYMNC LPSASGSFRY GSSCEFSCEQ GFVLKGSKRL QCGPTGEWDN | 420 |
| EKPTCEAVRC DAVHQPPKGL VRCAHSPIGE FTYKSSCAFS CEEGFELYGS TQLECTSQGQ | 480 |
| WTEEVPSCQV VKCSSLAVPG KINMSCSGEP VFGTVCKFAC PEGWTLNGSA ARTCGATGHW | 540 |
| SGLLPTCEAP TESNIPLVAG LSAAGLSLLT LAPFLLWLRK CLRKAKKFVP ASSCQSLESD | 600 |
| GSYQKPSYIL | |

ACC8 protein sentience
Gene name: Chemokine (C-X-C motif), receptor 4 (fusin)
Unigene number: Hs.89414
Probeset Accession #: L06797
Protein Accession #: NP_003458.1
Pfam: 7TM 1 (7 transmembrane receptor (rhodopsin family))
Signal sequence: none identified
Transmembrane domains: predictions underlined
Summary: The chemokine receptor CXCR4 (also designated fusin and LESTR)
is a cofactor for fusion and entry of T cell-tropic strains of HIV-1.

| | |
|---|---|
| MEGISIYTSD NYTEEMGSGD YDSMKEPCFR EENANFNKIF LPTIYSIIFL TGIVGNGLVI | 60 |
| LVMGYQKKLR SMTDKYRLHL SVADLLFVIT LPFWAVDAVA NWYFGNFLCK AVHVIYTVNL | 120 |
| YSSVLILAFI SLDRYLAIVH ATNSQRPRKL LAEKVVYVGV WIPALLLTIP DFIFANVSEA | 180 |
| DDRYICDRFY PNDLWVVVFQ FQHIMVGLIL PGIVILSCYC IIISKLSHSK GHQKRKALKT | 240 |
| TVILILAFFA CWLPYYIGIS IDSFILLEII KQGCEFENTV HKWISITEAL AFFHCCLNPI | 300 |
| LYAFLGAKFK TSAQHALTSV SRGSSLKILS KGKRGGHSSV STESESSSFH SS | |

ACF2 protein sequence
Gene name: Endothelial cell-specific molecule 1
Unigene number: Hs.41716
Probeset Accession #: X89426
Protein Accession #: NP_008967.1
Signal sequence: underlined
Pfam: IGFBP (Insulin-like growth factor binding proteins)
Summary: Human endothelial cell-specific molecule (called ESM-1) was
cloned from a human umbilical vein endothelial cell (HUVEC) cDNA library.
Constitutive ESM-1 gene expression is seen in HUVECs but not in the
other human cell lines. The cDNA sequence contains an open reading frame
of 552 nucleotides and a 1398-nucleotide 3′-untranslated region including
several domains involved in mRNA instability and five putative polyadenyl-
ation consensus sequences. The deduced 184-amino acid sequence defines a
cysteine-rich protein with a functional NH2-terminal hydrophobic signal
sequence.

| | |
|---|---|
| MKSVLLLTTL LVPAHLVAAW SNNYAVDCPQ HCDSSECKSS PRCKRTVLDD CGCCRVCAAG | 60 |
| RGETCYRTVS GMDGMKCGPG LRCQPSNGED PFGEEFGICK DCPYGTFGMD CRETCNCQSG | 120 |
| ICDRGTGKCL KFPFFQYSVT KSSNRFVSLT EHDMASGDGN IVREEVVKEN AAGSPVMRKW | 180 |
| LNPR | |

ACF4 protein sequence
Gene name: P53-responsive gene 2 similar to D.melanogaster peroxidasin
(U11052)
Unigene number: Hs.118893
Probeset Accession #: D86983
Protein Accession #: BAA13219
Pfam: LRRNT (Leucine rich repeat N-terminal domain), LRR (Leucine Rich
Repeat), LRRCT (Leucine rich repeat C-terminal domain), Ig (immunoglo-
bulin domain), Peroxidase, VWC (von Willebrand factor type C domain)
Summary: ACF4 is a gene originally identified from KG-1 cell and brain
cDNA libraries.

| | |
|---|---|
| SRPWWLRASE RPSAPSAMAK RSRGPGRRCL LALVLFCAWG TLAVVAQKPG AGCPSRCLCF | 60 |
| RTTVRCMHLL LEAVPAVAPQ TSILDLRFNR IREIQPGAFR RLRNLNTLLL NNNQIKRIPS | 120 |
| GAFEDLENLK YLYLYKNEIQ SIDRQAFKGL ASLEQLYLHF NQIETLDPDS FQHLPKLERL | 180 |
| FLHNNRITHL VPGTFNHLES MKRLRLDSNT LHCDCEILWL ADLLKTYAES GNAQAAAICE | 240 |
| YPRRIQGRSV ATITPEELNC ERPRITSEPQ DADVTSGNTV YFTCRAEGNP KPEIIWLRNN | 300 |
| NELSMKTDSR LNLLDDGTLM IQNTQETDQG IYQCMAKNVA GEVKTQEVTL RYFGSPARPT | 360 |
| FVIQPQNTEV LVGESVTLEC SATGHPPPRI SWTRGDRTPL PVDPRVNITP SGGLYIQNW | 420 |
| QGDSGEYACS ATNNIDSVHA TAFIIVQALP QFTVTPQDRV VIEGQTVDFQ CEAKGNPPPV | 480 |
| IAWTKGGSQL SVDRRHLVLS SGTLRISGVA LHDQGQYECQ AVNIIGSQKV VAHLTVQPRV | 540 |
| TPVFASIPSD TTVEVGANVQ LPCSSQGEPE PAITWNKDGV QVTESGKFHI SPEGFLTIND | 600 |
| VGPADAGRYE CVARNTIGSA SVSMVLSVNV PDVSRNGDPF VATSIVEAIA TVDRAINSTR | 660 |
| THLFDSRPRS PNDLLALFRY PRDPYTVEQA RAGEIFERTL QLIQEHVQHG LMVDLNGTSY | 720 |
| HYNDLVSPQY LNLIANLSGC TAHRRVNNCS DMCFHQKYRT HDGTCNNLQH PMWGASLTAF | 780 |
| ERLLKSVYEN GFNTPRGINP HRLYNGHALP MPRLVSTTLI GTETVTPDEQ FTHMLMQWGQ | 840 |
| FLDHDLDSTV VALSQARFSD GQHCSNVCSN DPPCFSVMIP PNDSRARSGA RCMFFVRSSP | 900 |
| VCGSGMTSLL MNSVYPREQI NQLTSYIDAS NVYGSTEHEA RSIRDLASHR GLLRQGIVQR | 960 |
| SGKPLLPFAT GPPTECMRDE NESPIPCFLA GDHRANEQLG LTSMHTLWFR EENRIATELL | 1020 |
| KLNPHWDGDT IYYETRKIVG AEIQHITYQH WLPKILGEVG MRTLGEYHGY DPGINAGIFN | 1080 |
| AFATAAFRFG HTLVNPLLYR LDENFQPIAQ DHLPLHKAFF SPFRIVNEGG IDPLLRGLFG | 1140 |
| VAGKMRVPSQ LLNTELTERL FSMAHTVALD LAAINIQRGR DHGIPPYHDY RVYCNLSAAH | 1200 |
| TFEDLKNEIK NPEIREKLKR LYGSTLNIDL FPALVVEDLV PGSRLGPTLM CLLSTQFKRL | 1260 |
| RDGDRLWYEN PGVFSPAQLT QIKQTSLARI LCDNADNITR VQSDVFRVAE FPHGYGSCDE | 1320 |
| IPRVDLRVWQ DCCEDCRTRG QFNAFSYHFR GRRSLEFSYQ EDKPTKKTRP RKIPSVGRQG | 1380 |
| EHLSNSTSAF STRSDASGTN DFREFVLEMQ KTITDLRTQI KKLESRLSTT ECVDAGGESH | 1440 |
| ANNTKWKKDA CTICECKDGQ VTCFVEACPP ATCAVPVNIP GACCPVCLQK RAEEKP | |

ACF5 protein sequence
Gene name: Mitogen-activated protein kinase kinase kinase kinase 4
Unigene number: Hs.3628
Probeset Accession #: N54067
Protein Accession #: NP_004825.1
Pfam: pkinase (Eukaryotic protein kinase domain), CNH domain
Summary: The yeast serine/threonine kinase STE20 activates a signaling
cascade that includes STE11 (mitogen-activated protein kinase kinase
kinase), STE7 (mitogen-activated protein kinase kinase), and FUS3/KSS1
(mitogen-activated protein kinase) in response to signals from both Cdc42
and the heterotrimeric G proteins associated with transmembrane pheromone
receptors. ACF5 is a human cDNA encoding a protein kinase homologous to
STE20. This protein kinase, also designated HPK/GCK-like kinase CHGK),
has nucleotide sequences that encode an open reading frame of 1165 amino
acids with 11 kinase subdomains. HGK is a serine/threonine protein kinase
that specifically activated the c-Jun N-terminal kinase (JNK) signaling
pathway when transfected into 293T cells, but does not stimulate either
the extracellular signal-regulated kinase or p38 kinase pathway. HGK also
increased AP-1-mediated transcriptional activity in vivo. HGK may be a
novel activator of the JNK pathway. The cascade may look like this:HGK
-> TAK1 -> MKK4, MKK7 -> JNK kinase cascade, which may
mediate the TNF-alpha signaling pathway.

| | |
|---|---|
| MANDSPAKSL VDIDLSSLRfl PAGIFELVEV VGNGTYGQVY KGRHVKTGQL AAIKVMDVTE | 60 |
| DEEEEIKLEI NMLKKYSHWR NIATYYGAFI KKSPPGHDDQ LWLVMEFCGA GSITDLVKMT | 120 |
| KGNTLKEDWI AYISREILRG LAHLHIHHVI HRDIKGQNVL LTENAEVKLV DFGVSAQLDR | 180 |
| TVGRRNTFIG TPYWMAPEVI ACDENPDATY DYRSDLWSCG ITAIEMAEGA PPLCDMHPMR | 240 |
| ALFLIPRNPP PRLKSKKWSK KFFSFIEGCL VKNYMQRPST EQLLKHPFIR DQPNERQVRI | 300 |
| QLKDHIDRTR KKRGEKDETE YEYSGSEEEE EEVPEQEGEP SSIVNVPGES TLRRDFLRLQ | 360 |
| QENKERSEAL RRQQLLQEQQ LREQEEYKRQ LLAERQKRIE QQKEQRRRLE EQQRREREAR | 420 |
| RQQEREQRRR EQEEKRRLEE LERRRKEEEE RRRAEEEKRR VEREQEYIRR QLEEEQRHLE | 480 |
| VLQQQLLQEQ AMLLHDERRP HPQHSQQPPP PQQERSKPSF HAPEPKAHYE PADRAREVPV | 540 |
| RTTSRSPVLS RRDSPLQGSG QQNSQAGQRN STSIEPRLLW ERVEKLVPRP GSGSSSGSSN | 600 |
| SGSQPGSHPG SQSGSGERFR VRSSSKSEGS PSQRLENAVK KPEDKKEVFR PLKPAGEV | 660 |
| TALAKELRAV EDVRPPHKVT DYSSSSEESG TTDEEDDDVE QEGADESTSG PEDTRAASSE | 720 |
| NLSNGETESV KTMIVNDDVE SEPAMTPSKE GTLIVRQTQS ASSTLQKHKS SSSFTPFIDP | 780 |
| RLLQISPSSG TTVTSVVGFS CDGMRPEAIR QDPTRKGSVV NVNPTNTRPQ SDTPEIRKYK | 840 |
| KRFNSEILCA ALWGVNLLVG TESGLMLLDR SGQGKVYPLI NRRRFQQMDV LEGLNVLVTI | 900 |
| SGKKDKLRVY YLSWLRNKIL HNDPEVEKKQ GWTTVGDLEG CVHYKVVKYE RIKFLVIALK | 960 |
| SSVEVYAWAP KPYHKFMAFK SFGELVHKPL LVDLTVEEGQ RLKVIYGSCA GFHAVDVDSG | 1020 |
| SVYDIYLPTH VRKNPHSMIQ CSIKPHAIII LPNTDGMELL VCYEDEGVYV NTYGRITKDV | 1080 |
| VLQWGEMPTS VAYIRSNQTM GWGEKAIEIR SVETGHLDGV FMHKRAQRLK FLCERNDKVF | 1140 |
| FASVRSGGSS QVYFMTLGRT SLLSW | |

ACF8 protein sequence
Gene name: Phospholipase A2, group IVC (cytosolic, calcium-independent)
Unigene number: Hs.18858
Probeset Accession #: AA054087
Protein Accession #: NP_003697.1
Pfam: none identified
Summary: ACF8 is a membrane-bound, calcium-independent PLA2, named cPLA2-
gamma. The sequence encodes a 541-amino acid protein containing a domain
with significant homology to the catalytic domain of the 85-kDa cPLA2
(cPLA2-alpha). cPLA2-gamma does not contain the regulatory calcium-depen-
dent lipid binding (caLB) domain found in cPLA2-alpha. cPLA2-gamma does
contain two consensus motifs for lipid modification, a prenylation motif
(-CCLA) at the C terminus and a myristoylation site at the N terminus.
cPLA2-gamma demonstrates a preference for arachidonic acid at the sn-2
position of phosphatidylcholine as compared with palmitic acid. cPLA2-
gamma encodes a 3-kilobase message, which is highly expressed in heart
and skeletal muscle, suggesting a specific role in these tissues.

| | |
|---|---|
| MGSSEVSIIP GLQKEEKAAV ERRRLHVLKA LKKLRIEADE APVVAVLGSG GGLRAHIACL | 60 |
| GVLSEMKEQG LLDAVTYLAG VSGSTWAISS LYTNDGDMEA LEADLKHRFT RQEWDLAKSL | 120 |
| QKTIQAARSE NYSLTDFWAY MVISKQTREL PESHLSNMKK PVEEGTLPYP IFAAIDNDLQ | 180 |
| PSWQEARAPE TWFEFTPHHA GFSALGAFVS ITHFGSKFKK GRLVRTHPER DLTFLRGLWG | 240 |
| SALGNTEVIR EYIFDQLRNL TLKGLWRRAV ANAKSIGHLI FARLLRLQES SQGEHPPPED | 300 |
| EGGEPEHTWL TEMLENWTRT SLEKQEQPHE DPERKGSLSN LMDFVKKTGI CASKWEWGTT | 360 |
| HNFLYKHGGI RDKIMSSRKH LHLVDAGLAI NTPFPLVLPP TREVHLILSF DFSAGDPFET | 420 |
| IFATTDYCRR HKIPFPQVEE AELDLWSKAP ASCYILKGET GPVVIHFPLF NIDACGGDIE | 480 |
| AWSDTYDTFK LADTYTLDVV VLLLALAKKN VRENKKKILR ELMNVAGLYY PKDSARSCCL | 540 |
| A | |

ACG1 protein sequence
Gene name: carbohydrate (chondroitin 6/keratan) sulfotransferase 1
Unigene number: Hs.104576
Probeset Accession #: AA868063
Protein Accession #: NP_003645.1
Pfam: none identified
Summary: Chondroitin 6-sulfotransferase (C6ST) is the key enzyme in the
biosynthesis of chondroitin 6-sulfate, a glycosaminoglycan implicated in
chondrogenesis, neoplasia, atherosclerosis, and other processes. C6ST
catalyzes the transfer of sulfate from 3′-phosphoadenosine 5′-phospho-
sulfate to carbon 6 of the N-acetylgalactosamine residues of chondroitin.

| | |
|---|---|
| MQCSWKAVLL LALASIAIQY TAIRTFTAKS FHTCPGLAEA GLAERLCEES PTFAYNLSRK | 60 |
| THILILATTR SGSSFVGQLF NQHLDVFYLF EPLYHVQNTL IPRFTQGKSP ADRRVMLGAS 120 | |
| RflLLRSLYDC DLYFLENYIK PPPVNHTTDR IFRRGASRVL CSRPVCDPPG PAflLVLEEGD 180 | |
| CVRKCGLLNL TVAAEACRER SHVAIKTVRV PEVNDLRALV EDPRLNLKVI QLVRflPRGIL 240 | |
| ASRSETFPflT YRLWRLWYGT GRKPYNLDVT QLTTVCEDFS NSVSTGLMRP PWLKGKYMLV 300 | |
| RYEDLARNPM KKTEEIYGFL GIPLDSHVAR WIQNNTRGDP TLGKHKYGTV RNSAATAEKW 360 | |
| RFRLSYDIVA FAQNACQQVL AQLGYKIAAS EEEL~G~PSVS LVEERDFRPF S | |

ACG5 protein sequence
Gene name: Multimerin
Unigene number: Hs.268107
Probeset Accession #: U27109
Protein Accession #: AAC52065
Sign sequence: prediction underlined
Pfam. EGF-like domain, Clq domain
Summary: Multimerin is a massive, soluble protein found in platelets and
in the endothelium of blood vessels. Multimerin is composed of varying
sized, disulfide-linked multimers, the smallest of which is a homotrimer.
Multimerin is a factor V/Va-binding protein and may function as a carrier
protein for platelet factor V. Northern analyses show a 4.7-kilobase tran-
script in cultured endothelial cells, a megakaryocytic cell line, plate-
lets, and highly vascular tissues. The multimerin cDNA can encode a pro-
tein of 1228 amino acids with the probable signal peptide cleavage site
between amino acids 19 and 20. The protein is predicted to be hydro-
philic and to contain 23 N-glycosylation sites. The adhesive motif RGDS
(Arg-Gly-Asp-Ser) and an epidermal growth factor-like domain were identi-
fied. Multimerin contains a probable coiled-coil structures in the
central portion of its sequence. Additionally, the carboxyl-terminal re-
gion of multimerin resembles the globular, non-collagen-like, carboxyl-
terminal domains of several other trimeric proteins, including complement
C1q and collagens type VIII and X.

| | |
|---|---|
| MKGARLFVLL SSLWSGGIGL NNSKHSWTIP EDGNSQKTMP SASVPPNKIQ SLQILPTTRV | 60 |
| MSAEIATTPE ARTSEDSLLK STLPPSETSA PAEGVRNQTL TSTEKAEGW KLQNLTLPTN | 120 |
| ASIKFNPGAE SVVLSNSTLK FLQSFARKSN EQATSLNTVG GTGGIGGVGG TGGVGNRAPR | 180 |
| ETYLSRGDSS SSQRTDYQKS NFETTRGKNW CAYVHTRLSP TVTLDNQVTY VPGGKGPCGW | 240 |
| TGGSCPQRSQ KISNPVYRMQ HKIVTSLDWR CCPGYSGPKC QLRAQEQQSL IHTNQAESHT | 300 |
| AVGRGVAEQQ QQQGCGDPEV MQKMTDQVNY QAMKLTLLQK KIDNISLTVN DVRNTYSSLE | 360 |
| GKVSEDKSRE FQSLLKGLKS KSINVLIRDI VREQFKIFQN DMQETVAQLF KTVSSLSEDL | 420 |
| ESTRQIIQKV NESVVSIAAQ QKFVLVQENR PTLTDIVELR NHIVNVRQEM TLTCEKPIKE | 480 |
| LEVKQTELEG ALEQEHSRSI LYYESLNKTL SKLKEVHEQL LSTEQVSDQK NAPAAESVSN | 540 |
| NVTEYMSTLH ENIKKQSLMM LQMFEDLHIQ ESKINNLTVS LEMEKESLRG ECEDMLSKCR | 600 |
| NDFKFQLIQT EENLHVLNQT LAEVLFPMDN KMDKMSEQLN DLTYDMEILQ PLLEQGASLR | 660 |
| QTMTYEQPKE AIVIRKKIEN LTSAVNSLNF IIKELTKRHN LLRNEVQGRD DALERRINEY | 720 |
| ALEMEDGLNK TMTIINNAID FIQDNYALKE TLSTIKDNSE IHHKCTSDME TILTFIPQFH | 780 |
| RLNDSIQTLV NDNQRYNFVL QVAKTLAGIP RDEKLNQSNF QKMYQMFNET TSQVRKYQQN | 840 |
| MSHLEEKLLL TTKISKNFET RLQDIESKVT QTLIPYYISV KKGSVVTNER DQALQLQVLN | 900 |
| SRFKALEAKS IHLSINFFSL NKTLHEVLTM CHNASTSVSE LNATIPKWIK HSLPDIQLLQ | 960 |
| KGLTEFVEPI IQIKTQAALS NSTCCIDRSL PGSLANVVKS QKQVKSLPKK INALKKPTVN | 1020 |
| LTTVLIGRTQ RNTDNIIYPE EYSSCSRHPC QNGGTCINGR TSFTCACRHP FTGDNCTIKL | 1080 |
| VEENALAPDF SKGSYRYAPM VAFFASHTYG MTIPGPILFN NLDVNYGASY TPRTGKFRIP | 1140 |
| YLGVYVFKYT IESFSAHISG FLVVDGIDKL AFESENINSE IHCDRVLTGD ALLELNYGQE | 1200 |
| VWLRILAKGTI PAKFPPVTTF SGYLLYRT | |

ACC6 protein sequence
Gene name: Homo sapiens cDNA FLJ11502 fis, clone HEMBA10021O2, weakly
similar to ANKRYIN
Unigene number: Hs.213194
Probeset Accession #: AA187101
Protein Accession #: none
Pfam: ankyrin repeats

| | |
|---|---|
| VAARPPVSRM EPRAADGCFL GDVGFWVERT PVHEAAQRGE SLQLQQLIES GACVNQVTVD | 60 |
| SITPLHAASL QGQARCVQLL LAAGAQVDAR NIDGSTPLCD ACASGSIECV KLLLSYGAKV | 120 |
| NPPLYTASPL HEASFPRLLS TLASTPWIN | |

ACC7 protein sequence
Gene name: Human PAL A gene
Unigene number: Hs.6906
Probeset Accession #: AA083572 cluster
Protein Accession #: P11233
Pfam: ras
Features: CAAX motif is underlined
Summary: The RALA gene encodes a low molecular mass ras-like GTP-binding
protein that shares about 50% similarity with the ras proteins. GTP-
binding proteins mediate the transmembrane signaling initiated by the
occupancy of certain cell surface receptors. The RALA gene maps to 7p22-
p15.

| | |
|---|---|
| MAANKPKGQN SLALHKVIMV GSGGVGKSAL TLQFMYDEFV EDYEPTKADS YRKKVVLDGE | 60 |
| EVQIDILDTA GQEDYAAIRD NYFRSGEGFL CVFSITEMES FAATADFREQ ILRVKEDENV | 120 |
| PFLLVGNKSD LEDKRQVSVE EAKNRAEQWN VNYVETSAKT RANVDKVFFD LMREIRARKM | 180 |
| EDSKEKNGKK KRKSLAKRIR ERCC | |

ACC9 protein sequence
Gene name: KIAA0955 protein
Unigene number: Hs.10031
Probeset Accession #: AA027168
Protein Accession #: BAA76799.1
Pfam: CARD (Caspase recruitment domain)
Summary: Gene was originally isolated as a brain cDNA. The coding region
contains a CARD domain, suggesting involvement in apoptotic signaling
pathways.

| | |
|---|---|
| MMRQRQSHYC SVLFLSVNYL GGTFPGDICS EENQIVSSYA SKVCFEIEED YKNRQFLGPE | 60 |
| GNVDVELIDK STNRYSVWFP TAGWYLWSAT GLGFLVRDEV TVTIAFGSWS QHLALDLQHH | 120 |
| EQWLVGGPLF DVTAEPEEAV AEIHLPHFIS LQGEVDVSWF LVARFKNEGM VLEHPARVEP | 180 |
| FYAVLESPSF SLMGILLRIA SGTRLSIPIT SNTLIYYHPH PEDIKFHLYL VPSDALLTKA | 240 |
| IDDEEDRFHG VRLQTSPPME PLNFGSSYIV SNSANLKVMP KELKLSYRSP GEIQHFSKFY | 300 |
| AGQMKEPIQL EITEKRHGTL VWDTEVKPVD LQLVAASAPP PFSGAAFVKE NHRQLQARMG | 360 |
| DLKGVLDDLQ DNEVLTENEK ELVEQEKTRQ SKNEALLSMV EKKGDLALDV LFRSISERDP | 420 |
| YLVSYLRQQN L | |

ACF6 Protein sequence
Gene name: Homo sapiens cDNA FLJ10669 fis, clone NT2RP2006275, weakly
similar to Microtubule-associated protein 1B [CONTAINS: LIGHT CHAIN
LC1]
Unigene number: Hs.66048
Probeset Accession #: AA609717
Protein Accession #: BAA91743.1
Pfam: none identified
Summary: The cDNA for FLJ10669 was originally isolated from NT2 neuronal
precursor cells (teratocarcinoma cell line) after 2-weeks of retinoic
acid (RA) treatment. The protein sequence has similarity to microtubule-
associated protein 1B (MAP-1B), suggesting a function for ACFE in the reg-
ulating the cytoskeleton.

| | |
|---|---|
| MGVGRLDMYV LHPPSAGAER TLASVCALLV WHPAGPGEKV VRVLFPGCTP PACLLDGLVR | 60 |
| LQHLRFLREP VVTPQDLEGP GRAESKESVG SRDSSKREGL LATHPRPGQE RPGVARKEPA | 120 |
| RAEAPRKTEK EAKTPRELKK DPKPSVSRTQ PREVRRAASS VPNLKKTNAQ AAPKPRKAPS | 180 |
| TSHSGFPPVA NGPRSPPSLR CGEASPPSAA CGSPASQLVA TPSLELGPIP AGEEKALELP | 240 |
| LAASSIPRPR TPSPESHRSP AEGSERLSLS PLRGGEAGPD ASPTVTTPTV TTPSLPAEVG | 300 |
| SPHSTEVDES LSVSFEQVLP PSAPTSEAGL SLPLRGPRAR RSASPHDVDL CLVSPCEFEH | 360 |
| RKAVPMAPAP ASPGSSNDSS ARSQERAGGL GAEETPPTSV SESLPTLSDS DPVPLAPGAA | 420 |
| DSDEDTEGFG VPRHDPLPDP LKVPPPLPDP SSICMVDPEM LPPKTARQTE NVSRTRKPLA | 480 |
| RPNSRAAAPK ATPVAAAKTK GLAGGDRASR PLSARSEPSE KGGRAPLSRK SSTPKTATRG | 540 |
| PSGSASSRPG VSATPPKSPV YLDLAYLPSG SSAHLVDEEF FQRVRALCYV ISGQDQRKEE | 600 |
| GMRAVLDALL ASKQHWDRDL QVTLIPTFDS VAMHTWYAET HARHQALGIT VLGSNGMVSM | 660 |
| QDDAFPACKV EF | |

The application's sequence listing, which the Patent Office published only in electronic form, follows.

SEQUENCE LISTING (135 sequences)

SEQ ID NO: 1 - DNA, 1152 bp, Homo sapiens
gttcgccgccgccgcgccggccacctggagttttttcagactccagatttccctgtcaaccacgaggagtccagagaggaaacgcggagcggagacaacagtacctgacgcctctttcagcccgggatcgccccagcagggatgggcgacaagatctggctgcccttccccgtgctccttctggccgctctgcctccggtgctgctgcctggggcggccggcttcacaccttccctcgatagcgacttcacctttacccttcccgccggccagaaggagtgcttctaccagcccatgcccctgaaggcctcgctggagatcgagtaccaagttttagatggagcaggattagatattgatttccatcttgcctctccagaaggcaaaaccttagtttttgaacaaagaaaatcagatggagttcacactgtagagactgaagttggtgattacatgttctgctttgacaatacattcagcaccatttctgagaaggtgattttctttgaattaatcctggataatatgggagaacaggcacaagaacaagaagattggaagaaatatattactggcacagatatattggatatgaaactggaagacatcctggaatccatcaacagcatcaagtccagactaagcaaaagtgggcacatacaaactctgcttagagcatttgaagctcgtgatcgaaacatacaagaaagcaactttgatagagtcaatttctggtctatggttaatttagtggtcatggtggtggtgtcagccattcaagtttatatgctgaagagtctgtttgaagataagaggaaaagtagaacttaaaactccaaactagagtacgtaacattgaaaaatgaggcataaaaatgcaataaactgttacagtcaagaccattaatggtcttctccaaaatattttgagatataaaagtaggaaacaggtataattttaatgtgaaaattaagtcttcactttctgtgcaagtaatcctgctgatccagttgtacttaagtgtgtaacaggaatattttgcagaatataggtttaactgaatgaagccatattaataactgcattttcctaactttgaaaaattttgcaaatgtcttaggtgatttaaataaatgagtattgggcctaaa

SEQ ID NO: 2 - DNA, 2757 bp, Homo sapiens
tctaaaggtcgggggcagcagcaagatgcgaagcgagccgtacagatcccgggctctccgaacgcaacttcgccctgcttgagcgaggctgcggtttccgaggccctctccagccaaggaaaagctacacaaaaagcctggatcactcatcgaaccacccctgaagccagtgaaggctctctcgcctcgccctctagcgttcgtctggagtagcgccaccccggcttcctggggacacagggttggcaccatggggcccaccagcgtcccgctggtcaaggcccaccgcagctcggtctctgactacgtcaactatgatatcatcgtccggcattacaactacacgggaaagctgaatatcagcgcggacaaggagaacagcattaaactgacctcggtggtgttcattctcatctgctgctttatcatcctggagaacatctttgtcttgctgaccatttggaaaaccaagaaattccaccgacccatgtactattttattggcaatctggccctctcagacctgttggcaggagtagcctacacagctaacctgctcttgtctggggccaccacctacaagctcactcccgcccagtggtttctgcgggaagggagtatgtttgtggccctgtcagcctccgtgttcagtctcctcgccatcgccattgagcgctatatcacaatgctgaaaatgaaactccacaacgggagcaataacttccgcctcttcctgctaatcagcgcctgctgggtcatctccctcatcctgggtggcctgcctatcatgggctggaactgcatcagtgcgctgtccagctgctccaccgtgctgccgctctaccacaagcactatatcctcttctgcaccacggtcttcactctgcttctgctctccatcgtcattctgtactgcagaatctactccttggtcaggactcggagccgccgcctgacgttccgcaagaacatttccaaggccagccgcagctctgagaatgtggcgctgctcaagaccgtaattatcgtcctgagcgtcttcatcgcctgctgggcaccgctcttcatcctgctcctgctggatgtgggctgcaaggtgaagacctgtgacatcctcttcagagcggagtacttcctggtgttagctgtgctcaactccggcaccaaccccatcatttacactctgaccaacaaggagatgcgtcgggccttcatccggatcatgtcctgctgcaagtgcccgagcggagactctgctggcaaattcaagcgacccatcatcgccggcatggaattcagccgcagcaaatcggacaattcctcccacccccagaaagacgaaggggacaacccagagaccattatgtcttctggaaacgtcaactcttcttcctagaactggaagctgtccacccaccggaagcgctctttacttggtcgctggccaccccagtgtttggaaaaaaatctctgggcttcgactgctgccagggaggagctgctgcaagccagagggaggaagggggagaatacgaacagcctggtggtgtcgggtgttggtgggtagagttagttcctgtgaacaatgcactgggaagggtggagatcaggtcccggcctggaatatatattctacccccctggagctttgattttgcactgagccaaaggtctagcattgtcaagctcctaaagggttcatttggcccctcctcaaagactaatgtccccatgtgaaagcgtctctttgtctggagctttgaggagatgttttccttcactttagtttcaaacccaagtgagtgtgtgcacttctgcttctttagggatgccctgtacatcccacaccccaccctcccttcccttcatacccctcctcaacgttcttttactttatactttaactacctgagagttatcagagctggggttgtggaatgatcgatcatctatagcaaataggctatgttgagtacgtaggctgtgggaagatgaagatggtttggaggtgtaaaacaatgtccttcgctgaggccaaagtttccatgtaagcgggatccgttttttggaatttggttgaagtcactttgatttctttaaaaaacatcttttcaatgaaatgtgttaccatttcatatccattgaagccgaaatctgcataaggaagcccactttatctaaatgatattagccaggatccttggtgtcctaggagaaacagacaagcaaaacaaagtgaaaaccgaatggattaacttttgcaaaccaagggagatttcttagcaaatgagtctaacaaatatgacatccgtctttcccacttttgttgatgtttatttcagaatcttgtgtgattcatttcaagcaacaacatgttgtattttgttgtgttaaaagtacttttcttgatttttgaatgtatttgtttcaggaagaagtcattttatggatttttctaacccgtgttaacttttctagaatccaccctcttgtgcccttaagcattactttaactggtagggaacgccagaacttttaagtccagctattcattagatagtaattgaagatatgtataaatattacaaagaataaaaatatattactgtctctttagtatggttttcagtgcaattaaaccgagagatgtcttgtttttttaaaaagaatagtatttaataggtttctgacttttgtggatcattttgcacatagctttatcaacttttaaacattaataaactgatttttttaaag

SEQ ID NO: 3 - DNA, 3220 bp, Homo sapiens
gagctgtccccggtgccgccgacccgggccgtgccgtgtgcccgtggctccagccgctgccgcctcgatctcctcgtctcccgctccgccctcccttttccctggatgaacttgcgtcctttctcttctccgccatggaattctgctccgtgcttttagccctcctgagccaaagaaaccccagacaacagatgcccatacgcagcgtatagcagtaactccccagctcggtttctgtgccgtagtttacagtatttaattttatataatatatattatttattatagcatttttgatacctcatattctgtttacacatcttgaaaggcgctcagtagttctcttactaaacaaccactactccagagaatggcaacgctgattaccagtactacagctgctaccgccgcttctggtcctttggtggactacctatggatgctcatcctgggcttcattattgcatttgtcttggcattctccgtgggagccaatgatgtagcaaattcttttggtacagctgtgggctcaggtgtagtgaccctgaagcaagcctgcatcctagctagcatctttgaaacagtgggctctgtcttactgggggccaaagtgagcgaaaccatccggaagggcttgattgacgtggagatgtacaactcgactcaagggctactgatggccggctcagtcagtgctatgtttggttctgctgtgtggcaactcgtggcttcgtttttgaagctccctatttctggaacccattgtattgttggtgcaactattggtttctccctcgtggcaaaggggcaggagggtgtcaagtggtctgaactgataaaaattgtgatgtcttggttcgtgtccccactgctttctggaattatgtctggaattttattcttcctggttcgtgcattcatcctccataaggcagatccagttcctaatggtttgcgagctttgccagttttctatgcctgcacagttggaataaacctcttttccatcatgtatactggagcaccgttgctgggctttgacaaacttcctctgtggggtaccatcctcatctcggtgggatgtgcagttttctgtgcccttatcgtctggttctttgtatgtcccaggatgaagagaaaaattgaacgagaaataaagtgtagtccttctgaaagccccttaatggaaaaaaagaatagcttgaaagaagaccatgaagaaacaaagttgtctgttggtgatattgaaaacaagcatcctgtttctgaggtagggcctgccactgtgcccctccaggctgtggtggaggagagaacagtctcattcaaacttggagatttggaggaagctccagagagagagaggcttcccagcgtggacttgaaagaggaaaccagcatagatagcaccgtgaatggtgcagtgcagttgcctaatgggaaccttgtccagttcagtcaagccgtcagcaaccaaataaactccagtggccactcccagtatcacaccgtgcataaggattccggcctgtacaaagagctactccataaattacatcttgccaaggtgggagattgcatgggagactccggtgacaaacccttaaggcgcaataatagctatacttcctataccatggcaatatgtggcatgcctctggattcattccgtgccaaagaaggtgaacagaagggcgaagaaatggagaagctgacatggcctaatgcagactccaagaagcgaattcgaatggacagttacaccagttactgcaatgctgtgtctgaccttcactcagcatctgagatagacatgagtgtcaaggcagcgatgggtctaggtgacagaaaaggaagtaatggctctctagaagaatggtatgaccaggataagcctgaagtctctctcctcttccagttcctgcagatccttacagcctgctttgggtcattcgcccatggtggcaatgacgtaagcaatgccattgggcctctggttgctttatatttggtttatgacacaggagatgtttcttcaaaagtggcaacaccaatatggcttctactctatggtggtgttggtatctgtgttggtctgtgggtttggggaagaagagttatccagaccatggggaaggatctgacaccgatcacaccctctagtggcttcagtattgaactggcatctgccctcactgtggtgattgcatcaaatattggccttcccatcagtacaacacattgtaaagtgggctctgttgtgtctgttggctggctccggtccaagaaggctgttgactggcgtctctttcgtaacatttttatggcctggtttgtcacagtccccatttctggagttatcagtgctgccatcatggcaatcttcagatatgtcatcctcagaatgtgaagctgtttgagattaaaatttgtgtcaatgtttgggaccatcttaggtattcctgctcccctgaagaatgattacagtgttaacagaagactgacaagagtctttttatttgggagcagaggagggaagtgttacttgtgctataactgcttttgtgctaaatatgaattgtctcaaaattagctgtgtaaaatagcccgggttccactggctcctgctgaggtcccctttccttctgggctgtgaattcctgtacatatttctctactttttgtatcaggcttcaattccattatgttttaatgttgtctctgaagatgacttgtgatttttttttcttttttttaaaccatgaagagccgtttgacagagcatgctctgcgttgttggtttcaccagcttctgccctcacatgcacagggatttaacaacaaaaatataactacaacttcccttgtagtctcttatataagtagagtccttggtactctgccctcctgtcagtagtggcaggatctattggcatattcgggagcttcttagagggatgaggttctttgaacacagtgaaaatttaaattagtaacttttttgcaagcagtttattgactgttattgctaagaagaagtaagaaagaaaaagcctgttggcaatcttggttatttctttaagatttctggcagtgtgggatggatgaatgaagtggaatgtgaactttgggcaagttaaatgggacagccttccatgttcatttgtctacctcttaactgaataaaaaagcctacagtttttagaaaaaacccgaattc

SEQ ID NO: 4 - DNA, 1743 bp, Homo sapiens
aaagaaggtaagggcagtgagaatgatgcatcttgcattccttgtgctgttgtgtctgccagtctgctctgcctatcctctgagtggggcagcaaaagaggaggactccaacaaggatcttgcccagcaatacctagaaaagtactacaacctcgaaaaggatgtgaaacagtttagaagaaaggacagtaatctcattgttaaaaaaatccaaggaatgcagaagttccttgggttggaggtgacagggaagctagacactgacactctggaggtgatgcgcaagcccaggtgtggagttcctgacgttggtcacttcagctcctttcctggcatgccgaagtggaggaaaacccaccttacatacaggattgtgaattatacaccagatttgccaagagatgctgttgattctgccattgagaaagctctgaaagtctgggaagaggtgactccactcacattctccaggctgtatgaaggagaggctgatataatgatctctttcgcagttaaagaacatggagacttttactcttttgatggcccaggacacagtttggctcatgcctacccacctggacctgggctttatggagatattcactttgatgatgatgaaaaatggacagaagatgcatcaggcaccaatttattcctcgttgctgctcatgaacttggccactccctggggctctttcactcagccaacactgaagctttgatgtacccactctacaactcattcacagagctcgcccagttccgcctttcgcaagatgatgtgaatggcattcagtctctctacggacctccccctgcctctactgaggaacccctggtgcccacaaaatctgttccttcgggatctgagatgccagccaagtgtgatcctgctttgtccttcgatgccatcagcactctgaggggagaatatctgttctttaaagacagatatttttggcgaagatcccactggaaccctgaacctgaatttcatttgatttctgcattttggccctctcttccatcatatttggatgctgcatatgaagttaacagcagggacaccgtttttatttttaaaggaaatgagttctgggccatcagaggaaatgaggtacaagcaggttatccaagaggcatccataccctgggttttcctccaaccataaggaaaattgatgcagctgtttctgacaaggaaaagaagaaaacatacttctttgcagcggacaaatactggagatttgatgaaaatagccagtccatggagcaaggcttccctagactaatagctgatgactttccaggagttgagcctaaggttgatgctgtattacaggcatttggatttttctacttcttcagtggatcatcacagtttgagtttgaccccaatgccaggatggtgacacacatattaaagagtaacagctggttacattgctaggcgagatagggggaagacagatatgggtgtttttaataaatctaataattattcatctaatgtattatgagccaaaatggttaatttttcctgcatgttctgtgactgaagaagatgagccttgcagatatctgcatgtgtcatgaagaatgtttctggaattcttcacttgcttttgaattgcactgaacagaattaagaaatactcatgtgcaataggtgagagaatgtattttcatagatgtgttattacttcctcaataaaaagttttattttgggcctgttcctt

SEQ ID NO: 5 - DNA, 5869 bp, Homo sapiens
aaacgccgcccaggacgcagccgccgccgccgccgctcctctgccactggctctgcgccccagcccggctctgctgcagcggcagggaggaagagccgccgcagcgcgactcgggagccccgggccacagcctggcctccggagccacccacaggcctccccgggcggcgcccacgctcctaccgcccggacgcgcggatcctccgccggcaccgcagccacctgctcccggcccagaggcgacgacacgatgcgctgcgcgctggcgctctcggcgctgctgctactgttgtcaacgccgccgctgctgccgtcgtcgccgtcgccgtcgccgtcgccgtcgccctcccagaatgcaacccagactactacggactcatctaacaaaacagcaccgactccagcatccagtgtcaccatcatggctacagatacagcccagcagagcacagtccccacttccaaggccaacgaaatcttggcctcggtcaaggcgaccacccttggtgtatccagtgactcaccggggactacaaccctggctcagcaagtctcaggcccagtcaacactaccgtggctagaggaggcggctcaggcaaccctactaccaccatcgagagccccaagagcacaaaaagtgcagacaccactacagttgcaacctccacagccacagctaaacctaacaccacaagcagccagaatggagcagaagatacaacaaactctggggggaaaagcagccacagtgtgaccacagacctcacatccactaaggcagaacatctgacgacccctcaccctacaagtccacttagcccccgacaacccactttgacgcatcctgtggccaccccaacaagctcgggacatgaccatcttatgaaaatttcaagcagttcaagcactgtggctatccctggctacaccttcacaagcccggggatgaccaccaccctaccgtcatcggttatctcgcaaagaactcaacagacctccagtcagatgccagccagctctacggccccttcctcccaggagacagtgcagcccacgagcccggcaacggcattgagaacacctaccctgccagagaccatgagctccagccccacagcagcatcaactacccaccgataccccaaaacaccttctcccactgtggctcatgagagtaactgggcaaagtgtgaggatcttgagacacagacacagagtgagaagcagctcgtcctgaacctcacaggaaacaccctctgtgcagggggcgcttcggatgagaaattgatctcactgatatgccgagcagtcaaagccaccttcaacccggcccaagataagtgcggcatacggctggcatctgttccaggaagtcagaccgtggtcgtcaaagaaatcactattcacactaagctccctgccaaggatgtgtacgagcggctgaaggacaaatgggatgaactaaaggaggcaggggtcagtgacatgaagctaggggaccaggggccaccggaggaggccgaggaccgcttcagcatgcccctcatcatcaccatcgtctgcatggcgtcattcctgctcctcgtggcggccctctatggctgctgccaccagcgcctctcccagaggaaggaccagcagcggctaacagaggagctgcagacagtggagaatggttaccatgacaacccaacactggaagtgatggagacctcttctgagatgcaggagaagaaggtggtcagcctcaacggggagctgggggacagctggatcgtccctctggacaacctgaccaaggacgacctggatgaggaggaagacacacacctctagtccggtctgccggtggcctccagcagcaccacagagctccagaccaaccaccccaagtgccgtttggatggggaagggaaagactggggagggagagtgaactccgaggggtgtcccctcccaatccccccagggccttaatttttcccttttcaacctgaacaaatcacattctgtccagattcctcttgtaaaataacccactagtgcctgagctcagtgctgctggatgatgagggagatcaagaaaaagccacgtaagggactttatagatgaactagtggaatcccttcattctgcagtgagattgccgagacctgaagagggtaagtgacttgcccaaggtcagagccacttggtgacagagccaggatgagaacaaagattccatttgcaccatgccacactgctgtgttcacatgtgccttccgtccagagcagtcccgggcaggggtgaaactccagcaggtggctgggctggaaaggagggcagggctacatcctggctcggtgggatctgacgacctgaaagtccagctcccaagttttccttctcctaccccagcctcgtgtacccatcttcccaccctctatgttcttacccctccctacactcagtgtttgttcccacttactctgtcctggggcctctgggattagcacaggttattcataaccttgaaccccttgttctggattcggattttctcacatttgcttcgtgagatgggggcttaacccacacaggtctccgtgcgtgaaccaggtctgcttaggggacctgcgtgcaggtgaggagagaaggggacactcgagtccaggctggtatctcagggcagctgatgaggggtcagcaggaacactggcccattgcccctggcactccttgcagaggccacccacgatcttctttgggcttccatttccaccagggactaaaatctgctgtagctagtgagagcagcgtgttccttttgttgttcactgctcagctgatgggagtgattccctgagacccagtatgaaagagcagtggctgcaggagaggccttcccggggccccccatcagcgatgtgtcttcagagacaatccattaaagcagccaggaaggacaggctttcccctgtatatcataggaaactcagggacatttcaagttgctgagagttttgttatagttgttttctaacccagccctccactgccaaaggccaaaagctcagacagttggcagacgtccagttagctcatctcactcactctgattctcctgtgccacaggaaaagagggcctggaaagcgcagtgcatgctgggtgcatgaagggcagcctgggggacagactgttgtgggaacgtcccactgtcctggcctggagctaggccttgctgttcctcttctctgtgagcctagtggggctgctgcggttctcttgcagtttctggtggcatctcaggggaacacaaaagctatgtctattccccaatataggacttttatgggctcggcagttagctgccatgtagaaggctcctaagcagtgggcatggtgaggtttcatctgattgagaagggggaatcctgtgtggaatgttgaactttcgccatggtctccatcgttctgggcgtaaattccctgggatcaagtaggaaaatgggcagaactgcttaggggaatgaaattgccatttttcgggtgaaacgccacacctccagggtcttaagagtcaggctccggctgtagtagctctgatgaaataggctatccactcgggatggcttactttttaaaagggtagggggaggggctggggaagatctgtcctgcaccatctgcctaattccttcctcacagtctgtagccatctgatatcctagggggaaaaggaaggccaggggttcacatagggccccagcgagtttcccaggagttagagggatgcgaggctaacaagttccaaaaacatctgccccgatgctctagtgtttggaggtgggcaggatggagaacagtgcctgtttgggggaaaacaggaaatcttgttaggcttgagtgaggtgtttgcttccttcttgcccagcgctgggttctctccacccagtaggttttctgttgtggtcccgtgggagaggccagactggattattcctcctttgctgatcctgggtcacacttcaccagccagggcttttgacggagacagcaaataggcctctgcaaatcaatcaaaggctgcaaccctatggcctcttggagacagatgatgactggcaaggactagagagcaggagtgcctggccaggtcggtcctgactctcctgactctccatcgctctgtccaaggagaacccggagaggctctgggctgattcagaggttactgctttatattcgtccaaactgtgttagtctaggcttaggacagcttcagaatctgacaccttgccttgctcttgccaccaggacacctatgtcaacaggccaaacagccatgcatctataaaggtcatcatcttctgccacctttactgggttctaaatgctctctgataattcagagagcattgggtctgggaagaggtaagaggaacactagaagctcagcatgacttaaacaggttgtagcaaagacagtttatcatcaactctttcagtggtaaactgtggtttccccaagctgcacaggaggccagaaaccacaagtatgatgactaggaagcctactgtcatgagagtggggagacaggcagcaaagcttatgaaggaggtacagaatattctttgcgttgtaagacagaatacgggtttaatctagtctaggcrccagatttttttcccgcttgataaggaaagctagcagaaagtttatttaaaccacttcttgagctttatcttttttgacaatatactggagaaactttgaagaacaagttcaaactgatacatatacacatatttttttgataatgtaaatacagtgaccatgttaacctaccctgcactgctttaagtgaacatactttgaaaaagcattatgttagctgagtgatggccaagttttttctctggacaggaatgtaaatgtcttactggaaatgacaagtttttgcttgatttttttttttaaacaaaaaatgaaatataacaagacaaacttatgataaagtatttgtcttgtagatcaggtgttttgttttgtttttttaattttaaaatgcaaccctgccccctccccagcaaagtcacagctccatttcagtaaaggttggagtcaatatgctctggttggcaggcaaccctgtagtcatggagaaaggtatttcaagatctagtccaatctttttctagagaaaaagataatctgaagctcacaaagatgaagtgacttcctcaaaatcacatggttcaggacagaaacaagattaaaacctggatccacagactgtgcgcctcagaaggaataatcggtaaattaagaattgctactcgaaggtgccagaatgacacaaaggacagaattcctttcccagttgttaccctagcaaggctagggagggcatgaacacaaacataagaactggtcttctcacactttctctgaatcatttaggtttaagatgtaagtgaacaattctttctttctgccaagaaacaaagttttggatgagcttttatatatggaacttactccaacaggactgagggaccaaggaaacatgatgggggaggcaagagagggcaaagagtaaaactgtagcatagcttttgtcacggtcactagctgatccctcaggtctgctgcaaacacagcatggaggacacagatgactctttggtgttggtctttttgtctgcagtgaatgttcaacagtttgcccaggaactgggggatcatatatgtcttagtggacaggggtctgaagtacactggaatttactgagaaacttgtttgtaaaaactatagttaataattattgcattttcttacaaaaatatattttggaaaattgtatactgtcaattaaagt

SEQ ID NO: 6 - DNA, 2742 bp, Homo sapiens
ctagtattctactagaactggaagattgctctccgagttttttttttgttattttgttaaaaaataaaaagcttgagcagcaattcatattactgtcacaggtatttttgctgtgctgtgcaaggtaactctgctagctaagattcacaatgttgaaagcccttttcctaactatgctgactctggcgctggtcaagtcacaggacaccgaagaaaccatcacgtacacgcaatgcactgacggatatgagtgggatcctgtgagacagcaatgcaaagatattgatgaatgtgacattgtcccagacgcttgtaaaggtggaatgaagtgtgtcaaccactatggaggatacctctgccttccgaaaacagcccagattattgtcaataatgaacagcctcagcaggaaacacaaccagcagaaggaacctcaggggcaaccaccggggttgtagctgccagcagcatggcaaccagtggagtgttgcccgggggtggttttgtggccagtgctgctgcagtcgcaggccctgaaatgcagactggccgaaataactttgtcatccggcggaacccagctgaccctcagcgcattccctccaacccttcccaccgtatccagtgtgcagcaggctacgagcaaagtgaacacaacgtgtgccaagacatagacgagtgcactgcagggacgcacaactgtagagcagaccaagtgtgcatcaatttacggggatcctttgcatgtcagtgccctcctggatatcagaagcgaggggagcagtgcgtagacatagatgaatgtaccatccctccatattgccaccaaagatgcgtgaatacaccaggctcattttattgccagtgcagtcctgggtttcaattggcagcaaacaactatacctgcgtagatataaatgaatgtgatgccagcaatcaatgtgctcagcagtgctacaacattcttggttcattcatctgtcagtgcaatcaaggatatgagctaagcagtgacaggctcaactgtgaagacattgatgaatgcagaacctcaagctacctgtgtcaatatcaatgtgtcaatgaacctgggaaattctcatgtatgtgcccccagggataccaagtggtgagaagtagaacatgtcaagatataaatgagtgtgagaccacaaatgaatgccgggaggatgaaatgtgttggaattatcatggcggcttccgttgttatccacgaaatccttgtcaagatccctacattctaacaccagagaaccgatgtgtttgcccagtctcaaatgccatgtgccgagaactgccccagtcaatagtctacaaatacatgagcatccgatctgataggtctgtgccatcagacatcttccagatacaggccacaactatttatgccaacaccatcaatacttttcggattaaatctggaaatgaaaatggagagttctacctacgacaaacaagtcctgtaagtgcaatgcttgtgctcgtgaagtcattatcaggaccaagagaacatatcgtggacctggagatgctgacagtcagcagtatagggaccttccgcacaagctctgtgttaagattgacaataatagtggggccattttcattttagtcttttctaagagtcaaccacaggcatttaagtcagccaaagaatattgttaccttaaagcactattttatttatagatatatctagtgcatctacatctctatactgtacactcacccataacaaacaattacaccatggtataaagtgggcatttaatatgtaaagattcaaagtttgtctttattactatatgtaaattagacattaatccactaaactggtcttcttcaagagagctaagtatacactatctggtgaaacttggattctttcctataaaagtgggaccaagcaatgatgatcttctgtggtgcttaaggaaacttactagagctccactaacagtctcataaggaggcagccatcataaccattgaatagcatgcaagggtaagaatgagtttttaactgctttgtaagaaaatggaaaaggtcaataaagatatatttctttagaaaatggggatctgccatatttgtgttggtttttattttcatatccagcctaaaggtggttgtttattatatagtaataaatcattgctgtacaacatgctggtttctgtagggtatttttaattttgtcagaaattttagattgtgaatattttgtaaaaaacagtaagcaaaattttccagaattcccaaaatgaaccagataccccctagaaaattatactattgagaaatctatggggaggatatgagaaaataaattccttctaaaccacattggaactgacctgaagaagcaaactcggaaaatataataacatccctgaattcaggcattcacaagatgcagaacaaaatggataaaaggtatttcactggagaagttttaatttctaagtaaaatttaaatcctaacacttcactaatttataactaaaatttctcatcttcgtacttgatgctcacagaggaagaaaatgatgatggtttttattcctggcatccagagtgacagtgaacttaagcaaattaccctcctacccaattctatggaatattttatacgtctccttgtttaaaatctgactgctttactttgatgtatcatatttttaaataaaaataaatattcctttagaagatcactctaaaa

SEQ ID NO: 7 - DNA, 3583 bp, Homo sapiens
acttgcgtctcgccctccggccaagcatggggcttcccaggctggtctgcgccttcttgctcgccgcctgctgctgctgtcctcgcgtcgcgggtgtgcccggagaggctgagcagcctgcgcctgagctggtggaggtggaagtgggcagcacagcccttctgaagtgcggcctctcccagtcccaaggcaacctcagccatgtcgactggttttctgtccacaaggagaagcggacgctcatcttccgtgtgcgccagggccagggccagagcgaacctggggagtacgagcagcggctcagcctccaggacagaggggctactctggccctgactcaagtcaccccccaagacgagcgcatcttcttgtgccagggcaagcgccctcggtcccaggagtaccgcatccagctccgcgtctacaaagctccggaggagccaaacatccaggtcaaccccctgggcatccctgtgaacagtaaggagcctgaggaggtcgctacctgtgtagggaggaacgggtaccccattcctcaagtcatctggtacaagaatggccggcctctgaaggaggagaagaaccgggtccacattcagtcgtcccagactgtggagtcgagtggtttgtacaccttgcagagtattctgaaggcacagctggttaaagaagacaaagatgcccagttttactgtgagctcaactaccggctgcccagtgggaaccacatgaaggagtccagggaagtcaccgtccctgttttctacccgacagaaaaagtgtggctggaagtggagcccgtgggaatgctgaaggaaggggaccgcgtggaaatcaggtgtttggctgatggcaaccctccaccacacttcagcatcagcaagcagaaccccagcaccagggaggcagaggaagagacaaccaacgacaacggggtcctggtgctggagcctgcccggaaggaacacagtgggcgctatgaatgtcaggcctggaacttggacaccatgatatcgctgctgagtgaaccacaggaactactggtgaactatgtgtctgacgtccgagtgagtcccgcagcccctgagagacaggaaggcagcagcctcaccctgacctgtgaggcagagagtagccaggacctcgagttccagtggctgagagaagagacagaccaggtgctggaaagggggcctgtgcttcagttgcatgacctgaaacgggaggcaggaggcggctatcgctgcgtggcgtctgtgcccagcatacccggcctgaaccgcacacagctggtcaagctggccatttttggccccccttggatggcattcaaggagaggaaggtgtgggtgaaagagaatatggtgttgaatctgtcttgtgaagcgtcagggcacccccggcccaccatctcctggaacgtcaacggcacggcaagtgaacaagaccaagatccacagcgagtcctgagcaccctgaatgtcctcgtgaccccggagctgttggagacaggtgttgaatgcacggcctccaacgacctgggcaaaaacaccagcatcctcttcctggagctggtcaatttaaccaccctcacaccagactccaacacaaccactggcctcagcacttccactgccagtcctcataccagagccaacagcacctccacagagagaaagctgccggagccggagagccggggcgtggtcatcgtggctgtgattgtgtgcatcctggtcctggcggtgctgggcgctgtcctctatttcctctataagaagggcaagctgccgtgcaggcgctcagggaagcaggagatcacgctgcccccgtctcgtaagaccgaacttgtagttgaagttaagtcagataagctcccagaagagatgggcctcctgcagggcagcagcggtgacaagagggctccgggagaccagggagagaaatacatcgatctgaggcattagccccgaatcacttcagctcccttccctgcctggaccattcccagctccctgctcactcttctctcagccaaagcctccaaagggactagagagaagcctcctgctcccctcacctgcacaccccctttcagagggccactgggttaggacctgaggacctcacttggccctgcaagccgcttttcagggaccagtccaccaccatctcctccacgttgagtgaagctcatcccaagcaaggagccccagtctcccgagcgggtaggagagtttcttgcagaacgtgttttttctttacacacattatggctgtaaatacctggctcctgccagcagctgagctgggtagcctctctgagctggtttcctgccccaaaggctggcttccaccatccaggtgcaccactgaagtgaggacacaccggagccaggcgcctgctcatgttgaagtgcgctgttcacacccgctccggagagcaccccagcggcatccagaagcagctgcagtgttgctgccaccaccctcctgctcgcctcttcaaagtctcctgtgacattttttctttggtcagaagccaggaactggtgtcattccttaaaagatacgtgccggggccaggtgtggtggctcacgcctgtaatcccagcactttgggaggccgaggcgggcggatcacaaagtcaggacgagaccatcctggctaacacggtgaaaccctgtctctactaaaaatacaaaaaaaaattagctaggcgtagtggttggcacctatagtcccagctactcggaaggctgaagcaggagaatggtatgaatccaggaggtggagcttgcagtgagccgagaccgtgccactgcactccagcctgggcaacacagcgagactccgtctcgaggaaaaaaaaagaaaagacgcgtacctgcggtgaggaagctgggcgctgttttcgagttcaggtgaattagcctcaatccccgtgttcacttgctcccatagccctcttgatggatcacgtaaaactgaaaggcagcggggagcagacaaagatgaggtctacactgtccttcatggggattaaagctatggttatattagcaccaaacttctacaaaccaagctcagggccccaaccctagaagggcccaaatgagagaatggtacttagggatggaaaacggggcctggctagagcttcgggtgtgtgtgtctgtctgtgtgtatgcatacatatgtgtgtatatatggttttgtcaggtgtgtaaatttgcaaattgtttcctttatatatgtatgtatatatatatatgaaaatatatatatatatgaaaaataaagcttaattgtcccagaaaatcatacattgcttttttattctacatgggtaccacaggaacctgggggcctgtgaaactacaaccaaaaggcacacaaaaccgtttccagttggcagcagagatcaggggttacctctgcttctgagcaaatggctcaagctctaccagagcagacagctaccctacttttcagcagcaaaacgtcccgtatgacgcagcacgaagggcctggcaggctgttagcaggagctatgtcccttcctatcgtttccgtccactt

SEQ ID NO: 8 - DNA, 1970 bp, Homo sapiens
atattggagtagcaagaggctgggaagccatcacttaccttgcactgagaaagaagacaaaggccagtatgcacagctttcctccactgctgctgctgctgttctggggtgtggtgtctcacagcttcccagcgactctagaaacacaagagcaagatgtggacttagtccagaaatacctggaaaaatactacaacctgaagaatgatgggaggcaagttgaaaagcggagaaatagtggcccagtggttgaaaaattgaagcaaatgcaggaattctttgggctgaaagtgactgggaaaccagatgctgaaaccctgaaggtgatgaagcagcccagatgtggagtgcctgatgtggctcagtttgtcctcactgaggggaaccctcgctgggagcaaacacatctgacctacaggattgaaaattacacgccagatttgccaagagcagatgtggaccatgccattgagaaagccttccaactctggagtaatgtcacacctctgacattcaccaaggtctctgagggtcaagcagacatcatgatatcttttgtcaggggagatcatcgggacaactctccttttgatggacctggaggaaatcttgctcatgcttttcaaccaggcccaggtattggaggggatgctcattttgatgaagatgaaaggtggaccaacaatttcagagagtacaacttacatcgtgttgcggctcatgaactcggccattctcttggactctcccattctactgatatcggggctttgatgtaccctagctacaccttcagtggtgatgttcagctagctcaggatgacattgatggcatccaagccatatatggacgttcccaaaatcctgtccagcccatcggcccacaaaccccaaaagcatgtgacagtaagctaacctttgatgctataactacgattcggggagaagtgatgttctttaaagacagattctacatgcgcacaaatcccttctacccggaagttgagctcaatttcatttctgttttctggccacaactgccaaatgggcttgaagctgcttacgaatttgccgacagagatgaagtccggtttttcaaagggaataagtactgggctgttcagggacagaatgtgctacacggataccccaaggacatctacagctcctttggcttccctagaactgtgaagcatatcgatgctgctctttctgaggaaaacactggaaaaacctacttctttgttgctaacaaatactggaggtatgatgaatataaacgatctatggatccaggttatcccaaaatgatagcacatgactttcctggaattggccacaaagttgatgcagttttcatgaaagatggatttttctatttctttcatggaacaagacaatacaaatttgatcctaaaacgaagagaattttgactctccagaaagctaatagctggttcaactgcaggaaaaattgaacattactaatttgaatggaaaacacatggtgtgagtccaaagaaggtgttttcctgaagaactgtctattttctcagtcatttttaacctctagagtcactgatacacagaatataatcttatttatacctcagtttgcatatttttttactatttagaatgtagccctttttgtactgatataatttagttccacaaatggtgggtacaaaaagtcaagtttgtggcttatggattcatataggccagagttgcaaagatcttttccagagtatgcaactctgacgttgatcccagagagcagcttcagtgacaaacatatcctttcaagacagaaagagacaggagacatgagtctttgccggaggaaaagcagctcaagaacacatgtgcagtcactggtgtcaccctggataggcaagggataactcttctaacacaaaataagtgttttatgtttggaataaagtcaaccttgtttctactgtttt

SEQ ID NO: 9 - DNA, 1155 bp, Homo sapiens
atggattgcagtaacggatcggcagagtgtaccggagaaggaggatcaaaagaggtggtggggacttttaaggctaaagacctaatagtcacaccagctaccattttaaaggaaaaaccagaccccaataatctggtttttggaactgtgttcacggatcatatgctgacggtggagtggtcctcagagtttggatgggagaaacctcatatcaagcctcttcagaacctgtcattgcaccctggctcatcagctttgcactatgcagtggaattatttgaaggattgaaggcatttcgaggagtagataataaaattcgactgtttcagccaaacctcaacatggatagaatgtatcgctctgctgtgagggcaactctgccggtatttgacaaagaagagctcttagagtgtattcaacagcttgtgaaattggatcaagaatgggtcccatattcaacatctgctagtctgtatattcgtcctgcattcattggaactgagccttctcttggagtcaagaagcctaccaaagccctgctctttgtactcttgagcccagtgggaccttatttttcaagtggaacctttaatccagtgtccctgtgggccaatcccaagtatgtaagagcctggaaaggtggaactggggactgcaagatgggagggaattacggctcatctctttttgcccaatgtgaagacgtagataatgggtgtcagcaggtcctgtggctctatggcagagaccatcagatcactgaagtgggaactatgaatctttttctttactggataaatgaagatggagaagaagaactggcaactcctccactagatggcatcattcttccaggagtgacaaggcggtgcattctggacctggcacatcagtggggtgaatttaaggtgtcagagagatacctcaccatggatgacttgacaacagccctggaggggaacagagtgagagagatgtttagctctggtacagcctgtgttgtttgcccagtttctgatatactgtacaaaggcgagacaatacacattccaactatggagaatggtcctaagctggcaagccgcatcttgagcaaattaactgatatccagtatggaagagaagagagcgactggacaattgtgctatcctga

SEQ ID NO: 10 - DNA, 1837 bp, Homo sapiens
ctcaaactcagctcacttgagagtctcctcccgccagctgtggaaagaactttgcgtctctccagcaatgcatctccttgcgattctgttttgtgctctctggtctgcagtgttggccgagaactcggatgattatgatctcatgtatgtgaatttggacaacgaaatagacaatggactccatcccactgaggaccccacgccgtgcgactgcggtcaggagcactcggaatgggacaagctcttcatcatgctggagaactcgcagatgagagagcgcatgctgctgcaagccacggacgacgtcctgcggggcgagctgcagaggctgcgggaggagctgggccggctcgcggaaagcctggcgaggccgtgcgcgccgggggctcccgcagaggccaggctgaccagtgctctggacgagctgctgcaggcgacccgcgacgcgggccgcaggctggcgcgtatggagggcgcggaggcgcagcgcccagaggaggcggggcgcgccctggccgcggtgctagaggagctgcggcagacgcgagccgacctgcacgcggtgcagggctgggctgcccggagctggctgccggcaggttgtgaaacagctattttattcccaatgcgttccaagaagatttttggaagcgtgcatccagtgagaccaatgaggcttgagtcttttagtgcctgcatttgggtcaaagccacagatgtattaaacaaaaccatcctgttttcctatggcacaaagaggaatccatatgaaatccagctgtatctcagctaccaatccatagtgtttgtggtgggtggagaggagaacaaactggttgctgaagccatggtttccctgggaaggtggacccacctgtgcggcacctggaattcagaggaagggctcacatccttgtgggtaaatggtgaactggcggctaccactgttgagatggccacaggtcacattgttcctgagggaggaatcctgcagattggccaagaaaagaatggctgctgtgtgggtggtggctttgatgaaacattagccttctctgggagactcacaggcttcaatatctgggatagtgttcttagcaatgaagagataagagagaccggaggagcagagtcttgtcacatccgggggaatattgttgggtggggagtcacagagatccagccacatggaggagctcagtatgtttcataaatgttgtgaaactccacttgaagccaaagaaagaaactcacacttaaaacacatgccagttgggaaggtctgaaaactcagtgcataataggaacacttgagactaatgaaagagagagttgagaccaatctttatttgtactggccaaatactgaataaacagttgaaggaaagacattggaaaaagcttttgaggataatgttactagactttatgccatggtgctttcagtttaatgctgtgtctctgtcagataaactctcaaataattaaaaaggactgtattgttgaacagagggacaattgttttacttttctttggttaattttgttttggccagagatgaattttacattggaagaataacaaaataagatttgttgtccattgttcattgttattggtatgtaccttattacaaaaaaaatgatgaaaacatatttatactacaaggtgacttaacaactataaatgtagtttatgtgttataatcgaatgtcacgtttttgagaagatagtcatataagttatattgcaaaagggatttgtattaatttaagactatttttgtaaagctctactgtaaataaaatattttataaaactaaaaaaaaaaaaaaa

SEQ ID NO: 11 - DNA, 8923 bp, Homo sapiens
agctcacagctattgtggtgggaaagggagggtggttggtggatgtcacagcttgggctttatctcccccagcagtggggactccacagcccctgggctacataacagcaagacagtccggagctgtagcagacctgattgagcctttgcagcagctgagagcatggcctagggtgggcggcaccattgtccagcagctgagtttcccagggaccttggagatagccgcagccctcatttgcaggggaaggcaccattgtccagcagctgagtttcccagggaccttggagatagccgcagccctcatttatgattcctgccagatttgccggggtgctgcttgctctggccctcattttgccagggaccctttgtgcagaaggaactcgcggcaggtcatccacggcccgatgcagccttttcggaagtgacttcgtcaacacctttgatgggagcatgtacagctttgcgggatactgcagttacctcctggcagggggctgccagaaacgctccttctcgattattggggacttccagaatggcaagagagtgagcctctccgtgtatcttggggaattttttgacatccatttgtttgtcaatggtaccgtgacacagggggaccaaagagtctccatgccctatgcctccaaagggctgtatctagaaactgaggctgggtactacaagctgtccggtgaggcctatggctttgtggccaggatcgatggcagcggcaactttcaagtcctgctgtcagacagatacttcaacaagacctgcgggctgtgtggcaactttaacatctttgctgaagatgactttatgacccaagaagggaccttgacctcggacccttatgactttgccaactcatgggctctgagcagtggagaacagtggtgtgaacgggcatctcctcccagcagctcatgcaacatctcctctggggaaatgcagaagggcctgtgggagcagtgccagcttctgaagagcacctcggtgtttgcccgctgccaccctctggtggaccccgagccttttgtggccctgtgtgagaagactttgtgtgagtgtgctggggggctggagtgcgcctgccctgccctcctggagtacgcccggacctgtgcccaggagggaatggtgctgtacggctggaccgaccacagcgcgtgcagcccagtgtgccctgctggtatggagtataggcagtgtgtgtccccttgcgccaggacctgccagagcctgcacatcaatgaaatgtgtcaggagcgatgcgtggatggctgcagctgccctgagggacagctcctggatgaaggcctctgcgtggagagcaccgagtgtccctgcgtgcattccggaaagcgctaccctcccggcacctccctctctcgagactgcaacacctgcatttgccgaaacagccagtggatctgcagcaatgaagaatgtccaggggagtgccttgtcactggtcaatcccacttcaagagctttgacaacagatacttcaccttcagtgggatctgccagtacctgctggcccgggattgccaggaccactccttctccattgtcattgagactgtccagtgtgctgatgaccgcgacgctgtgtgcacccgctccgtcaccgtccggctgcctggcctgcacaacagccttgtgaaactgaagcatggggcaggagttgccatggatggccaggacatccagctccccctcctgaaaggtgacctccgcatccagcatacagtgacggcctccgtgcgcctcagctacggggaggacctgcagatggactgggatggccgcgggaggctgctggtgaagctgtcccccgtctacgccgggaagacctgcggcctgtgtgggaattacaatggcaaccagggcgacgacttccttaccccctctgggctggcagagccccgggtggaggacttcgggaacgcctggaagctgcacggggactgccaggacctgcagaagcagcacagcgatccctgcgccctcaacccgcgcatgaccaggttctccgaggaggcgtgcgcggtcctgacgtcccccacattcgaggcctgccatcgtgccgtcagcccgctgccctacctgcggaactgccgctacgacgtgtgctcctgctcggacggccgcgagtgcctgtgcggcgccctggccagctatgccgcggcctgcgcggggagaggcgtgcgcgtcgcgtggcgcgagccaggccgctgtgagctgaactgcccgaaaggccaggtgtacctgcagtgcgggaccccctgcaacctgacctgccgctctctctcttacccggatgaggaatgcaatgaggcctgcctggagggctgcttctgccccccagggctctacatggatgagaggggggactgcgtgcccaaggcccagtgcccctgttactatgacggtgagatcttccagccagaagacatcttctcagaccatcacaccatgtgctactgtgaggatggcttcatgcactgtaccatgagtggagtccccggaagcttgctgcctgacgctgtcctcagcagtcccctgtctcatcgcagcaaaaggagcctatcctgtcggccccccatggtcaagctggtgtgtcccgctgacaacctgcgggctgaagggctcgagtgtaccaaaacgtgccagaactatgacctggagtgcatgagcatgggctgtgtctctggctgcctctgccccccgggcatggtccggcatgagaacagatgtgtggccctggaaaggtgtccctgcttccatcagggcaaggagtatgcccctggagaaacagtgaagattggctgcaacacttgtgtctgtcgggaccggaagtggaactgcacagaccatgtgtgtgatgccacgtgctccacgatcggcatggcccactacctcaccttcgacgggctcaaatacctgttccccggggagtgccagtacgttctggtgcaggattactgcggcagtaaccctgggacctttcggatcctagtggggaataagggatgcagccacccctcagtgaaatgcaagaaacgggtcaccatcctggtggagggaggagagattgagctgtttgacggggaggtgaatgtgaagaggcccatgaaggatgagactcactttgaggtggtggagtctggccggtacatcattctgctgctgggcaaagccctctccgtggtctgggaccgccacctgagcatctccgtggtcctgaagcagacataccaggagaaagtgtgtggcctgtgtgggaattttgatggcatccagaacaatgacctcaccagcagcaacctccaagtggaggaagaccctgtggactttgggaactcctggaaagtgagctcgcagtgtgctgacaccagaaaagtgcctctggactcatcccctgccacctgccataacaacatcatgaagcagacgatggtggattcctcctgtagaatccttaccagtgacgtcttccaggactgcaacaagctggtggaccccgagccatatctggatgtctgcatttacgacacctgctcctgtgagtccattggggactgcgcctgcttctgcgacaccattgctgcctatgcccacgtgtgtgcccagcatggcaaggtggtgacctggaggacggccacattgtgcccccagagctgcgaggagaggaatctccgggagaacgggtatgagtgtgagtggcgctataacagctgtgcacctgcctgtcaagtcacgtgtcagcaccctgagccactggcctgccctgtgcagtgtgtggagggctgccatgcccactgccctccagggaaaatcctggatgagcttttgcagacctgcgttgaccctgaagactgtccagtgtgtgaggtggctggccggcgttttgcctcaggaaagaaagtcaccttgaatcccagtgaccctgagcactgccagatttgccactgtgatgttgtcaacctcacctgtgaagcctgccaggagccgggaggcctggtggtgcctcccacagatgccccggtgagccccaccactctgtatgtggaggacatctcggaaccgccgttgcacgatttctactgcagcaggctactggacctggtcttcctgctggatggctcctccaggctgtccgaggctgagtttgaagtgctgaaggcctttgtggtggacatgatggagcggctgcgcatctcccagaagtgggtccgcgtggccgtggtggagtaccacgacggctcccacgcctacatcgggctcaaggaccggaagcgaccgtcagagctgcggcgcattgccagccaggtgaagtatgcgggcagccaggtggcctccaccagcgaggtcttgaaatacacactgttccaaatcttcagcaagatcgaccgccctgaagcctcccgcatcgccctgctcctgatggccagccaggagccccaacggatgtcccggaactttgtccgctacgtccagggcctgaagaagaagaaggtcattgtgatcccggtgggcattgggccccatgccaacctcaagcagatccgcctcatcgagaagcaggcccctgagaacaaggccttcgtgctgagcagtgtggatgagctggagcagcaaagggacgagatcgttagctacctctgtgaccttgcccctgaagcccctcctcctactctgcccccccacatggcacaagtcactgtgggcccggggctcttgggggtttcgaccctggggcccaagaggaactccatggttctggatgtggcgttcgtcctggaaggatcggacaaaattggtgaagccgacttcaacaggagcaaggagttcatggaggaggtgattcagcggatggatgtgggccaggacagcatccacgtcacggtgctgcagtactcctacatggtgaccgtggagtaccccttcagcgaggcacagtccaaaggggacatcctgcagcgggtgcgagagatccgctaccagggcggcaacaggaccaacactgggctggccctgcggtacctctctgaccacagcttcttggtcagccagggtgaccgggagcaggcgcccaacctggtctacatggtcaccggaaatcctgcctctgatgagatcaagaggctgcctggagacatccaggtggtgcccattggagtgggccctaatgccaacgtgcaggagctggagaggattggctggcccaatgcccctatcctcatccaggactttgagacgctcccccgagaggctcctgacctggtgctgcagaggtgctgctccggagaggggctgcagatccccaccctctcccctgcacctgactgcagccagcccctggacgtgatccttctcctggatggctcctccagtttcccagcttcttattttgatgaaatgaagagtttcgccaaggctttcatttcaaaagccaatatagggcctcgtctcactcaggtgtcagtgctgcagtatggaagcatcaccaccattgacgtgccatggaacgtggtcccggagaaagcccatttgctgagccttgtggacgtcatgcagcgggagggaggccccagccaaatcggggatgccttgggctttgctgtgcgatacttgacttcagaaatgcatggtgccaggccgggagcctcaaaggcggtggtcatcctggtcacggacgtctctgtggattcagtggatgcagcagctgatgccgccaggtccaacagagtgacagtgttccctattggaattggagatcgctacgatgcagcccagctacggatcttggcaggcccagcaggcgactccaacgtggtgaagctccagcgaatcgaagacctccctaccatggtcaccttgggcaattccttcctccacaaactgtgctctggatttgttaggatttgcatggatgaggatgggaatgagaagaggcccggggacgtctggaccttgccagaccagtgccacaccgtgacttgccagccagatggccagaccttgctgaagagtcatcgggtcaactgtgaccgggggctgaggccttcgtgccctaacagccagtcccctgttaaagtggaagagacctgtggctgccgctggacctgcccctgcgtgtgcacaggcagctccactcggcacatcgtgacctttgatgggcagaatttcaagctgactggcagctgttcttatgtcctatttcaaaacaaggagcaggacctggaggtgattctccataatggtgcctgcagccctggagcaaggcagggctgcatgaaatccatcgaggtgaagcacagtgccctctccgtcgagctgcacagtgacatggaggtgacggtgaatgggagactggtctctgttccttacgtgggtgggaacatggaagtcaacgtttatggtgccatcatgcatgaggtcagattcaatcaccttggtcacatcttcacattcactccacaaaacaatgagttccaactgcagctcagccccaagacttttgcttcaaagacgtatggtctgtgtgggatctgtgatgagaacggagccaatgacttcatgctgagggatggcacagtcaccacagactggaaaacacttgttcaggaatggactgtgcagcggccagggcagacgtgccagcccatcctggaggagcagtgtcttgtccccgacagctcccactgccaggtcctcctcttaccactgtttgctgaatgccacaaggtcctggctccagccacattctatgccatctgccagcaggacagttgccaccaggagcaagtgtgtgaggtgatcgcctcttatgcccacctctgtcggaccaacggggtctgcgttgactggaggacacctgatttctgtgctatgtcatgcccaccatctctggtctacaaccactgtgagcatggctgtccccggcactgtgatggcaacgtgagctcctgtggggaccatccctccgaaggctgtttctgccctccagataaagtcatgttggaaggcagctgtgtccctgaagaggcctgcactcagtgcattggtgaggatggagtccagcaccagttcctggaagcctgggtcccggaccaccagccctgtcagatctgcacatgcctcagcgggcggaaggtcaactgcacaacgcagccctgccccacggccaaagctcccacgtgtggcctgtgtgaagtagcccgcctccgccagaatgcagaccagtgctgccccgagtatgagtgtgtgtgtgacccagtgagctgtgacctgcccccagtgcctcactgtgaacgtggcctccagcccacactgaccaaccctggcgagtgcagacccaacttcacctgcgcctgcaggaaggaggagtgcaaaagagtgtccccaccctcctgccccccgcaccgtttgcccacccttcggaagacccagtgctgtgatgagtatgagtgtgcctgcaactgtgtcaactccacagtgagctgtccccttgggtacttggcctcaaccgccaccaatgactgtggctgtaccacaaccacctgccttcccgacaaggtgtgtgtccaccgaagcaccatctaccctgtgggccagttctgggaggagggctgcgatgtgtgcacctgcaccgacatggaggatgccgtgatgggcctccgcgtggcccagtgctcccagaagccctgtgaggacagctgtcggtcgggcttcacttacgttctgcatgaaggcgagtgctgtggaaggtgcctgccatctgcctgtgaggtggtgactggctcaccgcggggggactcccagtcttcctggaagagtgtcggctcccagtgggcctccccggagaacccctgcctcatcaatgagtgtgtccgagtgaaggaggaggtctttatacaacaaaggaacgtctcctgcccccagctggaggtccctgtctgcccctcgggctttcagctgagctgtaagacctcagcgtgctgcccaagctgtcgctgtgagcgcatggaggcctgcatgctcaatggcactgtcattgggcccgggaagactgtgatgatcgatgtgtgcacgacctgccgctgcatggtgcaggtgggggtcatctctggattcaagctggagtgcaggaagaccacctgcaacccctgccccctgggttacaaggaagaaaataacacaggtgaatgttgtgggagatgtttgcctacggcttgcaccattcagctaagaggaggacagatcatgacactgaagcgtgatgagacgctccaggatggctgtgatactcacttctgcaaggtcaatgagagaggagagtacttctgggagaagagggtcacaggctgcccaccctttgatgaacacaagtgtctggctgagggaggtaaaattatgaaaattccaggcacctgctgtgacacatgtgaggagcctgagtgcaacgacatcactgccaggctgcagtatgtcaaggtgggaagctgtaagtctgaagtagaggtggatatccactactgccagggcaaatgtgccagcaaagccatgtactccattgacatcaacgatgtgcaggaccagtgctcctgctgctctccgacacggacggagcccatgcaggtggccctgcactgcaccaatggctctgttgtgtaccatgaggttctcaatgccatggagtgcaaatgctcccccaggaagtgcagcaagtgaggctgctgcagctgcatgggtgcctgctgctgcctgccttggcctgatggccaggccagagtgctgccagtcctctgcatgttctgctcttgtgcccttctgagcccacaataaaggctgagctcttatcttgctgcatgttctgctcttgtgcccttctgagcccacaat

SEQ ID NO: 12 - DNA, 6816 bp, Homo sapiens
gaacgctcacagaacaggcagtgcaattccatgttcctcttaagtatgttagccctaccgggagctgagctggccagtctacttggagaggaaaagtagatctggggaaggtggaagggtcagttcctaagtgacttcctcctcggggatggtaagggcatttgctgatctccagtgactgcctggtgcctcatggtcagactcggctgtctcactcccagatatctgattttgcaaaaagggacacacctatctgcagcaaagaagacactgaccagattgcgagcggtgcttttggatgctctgtagccacccggggcccaggaggactgactcggcagcaggattcgtgcatgggaatcggagaccatggcagtgcagctggtgcccgactcagctctcggcctgctgatgatgacggagggccgccgatgtcaagtacatcttcttgatgacaggaagctggaactcctagtacagcccaagctgttggccaaggagcttcttgaccttgtggcttctcacttcaatctgaaggaaaaggagtactttggaatagcattcacagatgaaacgggacacttaaactggcttcagctagatcgaagagtattggaacatgacttccctaaaaagtcaggacccgtggttttatacttttgtgtcaggttctatatagaaagcatttcatacctgaaggataatgctaccattgagcttttctttctgaacgcgaagtcctgcatctacaaggagcttattgacgttgacagcgaagtggtgtttgaattagcttcctatattttacaggaggcaaagggagatttttctagcaatgaagttgtgaggagtgacttgaagaagctgccagcccttcccacccaagccctgaaggagcacccttccctggcctactgtgaagacagagtcattgagcactacaagaaactgaacggtcagacaagaggtcaagcaatcgtaaactacatgagcatcgtggagtctctcccaacctacggggttcactattatgcagtgaaggacaagcagggcataccatggtggctgggcctgagctacaaagggatcttccagtatgactaccatgataaagtgaagccaagaaagatattccaatggagacagttggaaaacctgtacttcagagaaaagaagttttccgtggaagttcatgacccacgcagggcttcagtgacaaggaggacgtttgggcacagcggcattgcagtgcacacgtggtatgcatgtccggcattgatcaagtccatctgggctatggccataagccaacaccagttctatctggacagaaagcagagtaagtccaaaatccatgcagcacgcagcctgagtgagatcgccatcgacctgaccgagacggggacgctgaagacctcgaagctggccaacatgggtagcaaggggaagatcatcagcggcagcagcggcagcctgctgtcttcaggttctcaggaatcagatagctcgcagtcggccaagaaggacatgctggctgccttgaagtccaggcaggaagctctggaggaaaccctgcgtcagaggctggaggaactgaagaagctgtgtctccgagaagctgagctcacgggcaagctgccagtagaatatcccctggatccaggggaggaaccacccattgttcggagaagaataggaacagccttcaaactggatgaacagaaaatcctgcccaaaggagaggaagctgagctggaacgcctggaacgagagtttgccattcagtcccagattacggaggccgcccgccgcctagccagtgaccccaacgtcagcaaaaaactgaagaaacaaaggaaaacctcgtatctgaatgcactgaagaaactgcaggagattgaaaatgcaatcaatgagaaccgcatcaagtctgggaagaaacccacccagagggcttcgctgatcatagacgatggaaacattgccagtgaagacagctccctctcagatgcccttgttcttgaggatgaagactctcaggttaccagcacaatatcccccctacattctcctcacaagggactccctcctcggccaccgtcgcacaacaggcctcctcctccccagtccctggagggactccgacagatgcactatcaccgcaacgactatgacaagtcacccatcaagcccaaaatgtggagtgagtcctctttagatgaaccctatgagaaggtcaagaagcgctcctctcacagccattccagcagccacaagcgcttccccagcacaggaagctgtgcggaagccggcggaggaagcaactccttgcagaacagccccatccgcggcctcccgcactggaactcccagtccagcatgccgtccacgccagacctgcgggtccggagtccccactacgtccattccacgaggtcggtggacatcagccccacccgactgcacagcctcgcactgcactttaggcaccggagctccagcctggagtcccagggcaagctcctgggctcggaaaacgacaccgggagccccgacttctacaccccgcggactcgtagcagcaacggctcagaccccatggacgactgctcgtcgtgcaccagccactcgagctcggagcactactacccggcgcagatgaacgccaactactccacgctggccgaggactcgccgtccaaggcgcgccagaggcagaggcagcggcagcgggcggcgggcgcactgggctcagccagctcgggcagcatgcccaacctggcggcgcgcgggggtgcggggggcgcggggggcgcggggggcggtgtgtacctgcacagccagagccagcccagctcgcagtaccgcatcaaggagtacccgctgtacatcgagggcggcgccacgcccgtggtggtgcgcagcctggagagcgaccaggagtgccactacagcgtcaaggctcagttcaagacgtccaactcctacacggcgggcggcctgttcaaggagagctggcgcggcggcggcggcgacgagggcgacacgggccgcctgacgccgtcgcgatcgcagatcctgcggactccgtcgctgggccgcgagggcgcccacgacaagggcgcgggccgtgccgccgtctcagacgagctgcgccagtggtaccagcgttccaccgcctcgcacaaggagcacagccgcctgtcgcacaccagctccacctcctcggacagcggctcgcagtacagcacctcctcccagagcaccttcgtggcgcacagcagggtcaccaggatgccccagatgtgcaaggccacgtcagctgccttacctcaaagccagagaagctcgacaccgtcaagtgaaattggagccacccccccaagcagcccccaccacatcctaacctggcagactggagaagcaacagaaaactcacccattctggatgggtctgagtctccacctcaccaaagtactgatgaatagaggagctacaatgatagctgtttcctggattcctccctctatccagaactagctgatgtccagtggtacgggcaggaaaaagccaagcccgggaccctcgtgtgagccagcccggcctaatctgaccgcctcaacgccattctgagatcacctcactgcctctcatttgccttacccagacgcaccgtcaccctgcaccagctttggccctcagcactttttttctcctgtctccgcattccctcccccttgaaaacctgactgaggagacattctggaaggttccggtcccactgtgtgtcccctggcgctcttgcccatagagagccagacaccaatcctcaatggcaccttggtggcttccctctgccatgacagcccctaggccaggaaccatcaggggggccagccggcatccaattcctgcggataagtagcgttgggagagaacgggaaaggggacttgggttacagggtgacccagaaagacgattcagctgtgtccagcctgccacccatacgtaggccaaccaagcacttcatgaagaggaggcctcgtggcatattcagtttacacctgaaatattccttgatgggacagcttgtggggatggctatgggggaaggggaggttgagaaaggaagttctcgacaccagaaatgcatcggaggaccacaatcagttctatgctgccaaagattaaaaataaataaaaacataaaaaattaagaggggccaagaggaagacattctttctgcaaggaaatttcttttaaattctgaactgctactacacacaagtgaaagtcaaccctatgtaaactggtgtcctctctctagccctctcccttactggcccacttctctctccgtagagagcctgaaaaactgccccaatgccacggtaaaggcgaggaagtcttggctggcgttgctgactcacagtcgccatccatctggacacaaagagagacctgtgggagtcatagagggtactgttagccccggtccatgcagggggttcagccgagcccaagactcaaagctgctttcctttcaggatttgtagtaacgtaaggtgataatggccaaaagtggttctctctcattaaaccaaccagtaaaagcgtatcctatttttttgcataaggtgtttcattttcgtttttatgggaaaccaagggaaaagcacattgcgatccattcagtgtttaactgtcgtggctcattttctgttcgttagcacttgtgtgacaaaagagctcagatccgacttctcctatgtgtcacttattccaagaacccaactatgcccttaggtagaaagatttgactcgtgtgtctactagccaacaggcagagcagggttgaaaaaaatatcagctcccaaagggcccatgtgtctacatcatcagttactgtcatgcaccacatttgtgtgcagataccaaaagaggaggaaagaagaaaaaaattaatgtgtgggagctgcacgtttacatgttttgagctatgcttcaaacacaactggaaagccatcaatcttcaaaggcctcaaaaatacttttatagtaacaagtgcacgactttagttgggttattcaagatggcacaaaaaggtttccgcagaggtggtatgctgtgcttttggcgcaagtggtggggggatgggggtgggggtggaatttttttctcactctaatgacttcctattggaaaggcattgacagccagggacaggagccagggtgggggtagttttgtgggaaagcagaactgaagttagcttaagcataaaaacaaagaaaaatcttcgcttttcatgtatgtggaatccaagaataaccataggctctaccagaccaggagggtaaggatggacactaaaatgaaacaaataccaaggtattccttctgctgcagcctggagaccaccgagagtcgagctggggcacacacacacctggccgggacccggcagggacaaggcgggccgtggcctcctccaccaagtctctctagacaattcagggcctgctttccccagctccatgcatggctggactggtgattccagggtgcagaagggattcatattcccagaacgctttaagtgtacacctgcaggataaagagataccggttacattattaaatgattctagggattcactgggggatatttttgttgcttttactttcatggttagagctacaaagaacagtgattttttttttttctcccttccccattcagaaacattatacattgggccatttttctttctcccaaagaagattcatggatagtcagactgaactgtgtgcaacaggaaaagtcaaaagggaaaaggcagctgatgaggttacatggttacatgttctacatcatgcagagtagcttgaaatctagtctggagaaaactggatcaagattctagcccactggagttgcaaggaatgagaggcaaaaattctaaagatttgggttatattttcaacttgggggacagagagaaatggagagcaggaattacagttccaacaaacatcatgatagtctggtagtcaagacagagattaagtaaaacaggttttactgtttagctgagttcagttaatacaaaatgtacataaaacgttagtcctttgagactgacatgattaatgatcagtgtggtgggaaatgatgtagttattgtacacaagcacttgcaaactctttatccctatttctttaaaacaaaataaggtgaaatacgaagtccttggtctgatataaagcccctattggattcttcggatgcgtaaaagaaattgcctgtttcagccagaagactggtgaaaacacatacatcagactatgttgtgagccaggttgattttttattttattatatgcaggtgagtgttgaaactgttaaaattccaatttgttttcattcagtattagtttagttctaaatatagcaaaccccatccaggtgctatcagatgaccagttactgcttagttaactaggtgtaaagttttacatatacattaatttcaatagtttattacaagttgtgtaaaatggactctagtttaataatgggggaaaaaagattaggttgctcctgaaactgactgtagagcatgtaaaatgattttactggattctgttcaactgtaatcaatgaaaaagatgtacgttgtagacaaagttgcagaattaaaaaaagaaatctgcttttaatttattctttttgtattaagaatttgtatagtatctttacattttgcaaaacagtgttgtcaacacttattaaagcattttcaaaatg

SEQ ID NO: 13 - DNA, 2280 bp, Homo sapiens
ccggggacatgtctaaccccggaggccggaggaacgggcccgtcaagctgcgcctgacagtactctgtgcaaaaaacctggtgaaaaaggattttttccgacttcctgatccatttgctaaggtggtggttgatggatctgggcaatgccattctacagatactgtgaagaatacgcttgatccaaagtggaatcagcattatgacctgtatattggaaagtctgattcagttacgatcagtgtatggaatcacaagaagatccataagaaacaaggtgctggatttctcggttgtgttcgtcttctttccaatgccatcaaccgcctcaaagacactggttatcagaggttggatttatgcaaactcgggccaaatgacaatgatacagttagaggacagatagtagtaagtcttcagtccagagaccgaataggcacaggaggacaagttgtggactgcagtcgtttatttgataacgatttaccagacggctgggaagaaaggagaaccgcctctggaagaatccagtatctaaaccatataacaagaactacgcaatgggagcgcccaacacgaccggcatccgaatattctagccctggcagacctcttagctgctttgttgatgagaacactccaattagtggaacaaatggtgcaacatgtggacagtcttcagatcccaggctggcagagaggagagtcaggtcacaacgacatagaaattacatgagcagaacacatttacatactcctccagacctaccagaaggctatgaacagaggacaacgcaacaaggccaggtgtatttcttacatacacagactggtgtgagcacatggcatgatccaagagtgcccagggatcttagcaacatcaattgtgaagagcttggtccgttgcctcctggatgggagatccgtaatacggcaacaggcagagtttatttcgttgaccataacaacagaacaacacaatttacagatcctcggctgtctgctaacttgcatttagttttaaatcggcagaaccaattgaaagaccaacagcaacagcaagtggtatcgttatgtcctgatgacacagaatgcctgacagtcccaaggtacaagcgagacctggttcagaaactaaaaattttgcggcaagaactttcccaacaacagcctcaggcaggtcattgccgcattgaggtttccagggaagagatttttgaggaatcatatcgacaggtcatgaaaatgagaccaaaagatctctggaagcgattaatgataaaatttcgtggagaagaaggccttgactatggaggcgttgccagggaatggttgtatctcttgtcacatgaaatgttgaatccatactatggcctcttccagtattcaagagatgatatttatacattgcagatcaatcctgattctgcagttaatccggaacatttatcctatttccactttgttggacgaataatgggaatggctgtgtttcatggacattatattgatggtggtttcacattgcctttttataagcaattgcttgggaagtcaattaccttggatgacatggagttagtagatccggatcttcacaacagtttagtgtggatacttgagaatgatattacaggtgttttggaccataccttctgtgttgaacataatgcatatggtgaaattattcagcatgaacttaaaccaaatggcaaaagtatccctgttaatgaagaaaataaaaaagaatatgtcaggctctatgtgaactggagatttttacgaggcattgaggctcaattcttggctctgcagaaaggatttaatgaagtaattccacaacatctgctgaagacatttgatgagaaggagttagagctcattatttgtggacttggaaagatagatgttaatgactggaaggtaaacacccggttaaaacactgtacaccagacagcaacattgtcaaatggttctggaaagctgtggagttttttgatgaagagcgacgagcaagattgcttcagtttgtgacaggatcctctcgagtgcctctgcagggcttcaaagcattgcaaggtgctgcaggcccgagactctttaccatacaccagattgatgcctgcactaacaacctgccgaaagcccacacttgcttcaatcgaatagacattccaccctatgaaagctatgaaaagctatatgaaaagctgctaacagccattgaagaaacatgtggatttgctgtggaatgacaagcttcaaggatttacccaggac

SEQ ID NO: 14 - DNA, 928 bp, Homo sapiens
ctccactatggacagagcctccactgagctgctgcctgcccgccacatacccagctgacaggggccccgcagagccatgcagctgtgctggggtgatcctgggcttcctcctgttccgaggccacaactcccagcccacaatgacccagacctctagctctcagggaggccttggcggtctaagtctgaccacagagccagtttcttccaacccaggatacatcccttcctcagaggctaacaggccaagccatctgtccagcactggtaccccaggcgcaggtgtccccagcagtggaagagacggaggcacaagcagagacacatttcaaactgttccccccaattcaaccaccatgagcctgagcatgagggaagatgcgaccatcctgcccagccccacgtcagagactgtgctcactgtggctgcatttggtgttatcagcttcattgtcatcctggtggttgtggtgatcatcctagttggtgtggtcagcctgaggttcaagtgtcggaagagcaaggagtctggagatccccagaaacctggagagcgggaggagaaggtgggacataggagggaaccctacccctggaattgacttggactctgggtctggaaacgcaagttcaaatctcacccatttgttccaggaggttctggctgatgaggaagacccttgtgggaggggggcccctgccctccagttagctcttcttggctgtgctgggttccatgttctcatgcagggatggagtcgggtggagagcccactctggctagggggcggcaggctgagagctcacctgttcagcagagaagtggaactcactttgctcctggagcctccctacacagtacttatctgggaagggaatgccggactcttgttggcccctttgtccccccgactggcccccttcgccg

SEQ ID NO: 15 - DNA, 6699 bp, Homo sapiens
aaagccctcagcctttgtgtccttctctgcgccggagtggctgcagctcacccctcagctccccttggggcccagctgggagccgagatagaagctcctgtcgccgctgggcttctcgcctcccgcagagggccacacagagaccgggatggccacctccatgggcctgctgctgctgctgctgctgctcctgacccagcccggggcggggacgggagctgacacggaggcggtggtctgcgtggggaccgcctgctacacggcccactcgggcaagctgagcgctgccgaggcccagaaccactgcaaccagaacgggggcaacctggccactgtgaagagcaaggaggaggcccagcacgtccagcgagtactggcccagctcctgaggcgggaggcagccctgacggcgaggatgagcaagttctggattgggctccagcgagagaagggcaagtgcctggaccctagtctgccgctgaagggcttcagctgggtgggcgggggggaggacacgccttactctaactggcacaaggagctccggaactcgtgcatctccaagcgctgtgtgtctctgctgctggacctgtcccagccgctccttcccaaccgcctgcccaagtggtctgagggcccctgtgggagcccaggctcccccggaagtaacattgagggcttcgtgtgcaagttcagcttcaaaggcatgtgccggcctctggccctggggggcccaggtcaggtgacctacaccacccccttccagaccaccagttcctccttggaggctgtgccctttgcctctgcggccaatgtagcctgtggggaaggtgacaaggacgagactcagagtcattatttcctgtgcaaggagaaggcccccgatgtgttcgactggggcagctcgggccccctctgtgtcagccccaagtatggctgcaacttcaacaatgggggctgccaccaggactgctttgaagggggggatggctccttcctctgcggctgccgaccaggattccggctgctggatgacctggtgacctgtgcctctcgaaacccttgcagctccagcccatgtcgtgggggggccacgtgcgtcctgggaccccatgggaaaaactacacgtgccgctgcccccaagggtaccagctggactcgagtcagctggactgtgtggacgtggatgaatgccaggactccccctgtgcccaggagtgtgtcaacacccctgggggcttccgctgcgaatgctgggttggctatgagccgggcggtcctggagagggggcctgtcaggatgtggatgagtgtgctctgggtcgctcgccttgcgcccagggctgcaccaacacagatggctcatttcactgctcctgtgaggagggctacgtcctggccggggaggacgggactcagtgccaggacgtggatgagtgtgtgggcccggggggccccctctgcgacagcttgtgcttcaacacacaagggtccttccactgtggctgcctgccaggctgggtgctggccccaaatggggtctcttgcaccatggggcctgtgtctctgggaccaccatctgggccccccgatgaggaggacaaaggagagaaagaagggagcaccgtgccccgcgctgcaacagccagtcccacaaggggccccgagggcacccccaaggctacacccaccacaagtagaccttcgctgtcatctgacgcccccatcacatctgccccactcaagatgctggcccccagtgggtcctcaggcgtctggagggagcccagcatccatcacgccacagctgcctctggcccccaggagcctgcaggtggggactcctccgtggccacacaaaacaacgatggcactgacgggcaaaagctgcttttattctacatcctaggcaccgtggtggccatcctactcctgctggccctggctctggggctactggtctatcgcaagcggagagcgaagagggaggagaagaaggagaagaagccccagaatgcggcagacagttactcctgggttccagagcgagctgagagcagggccatggagaaccagtacagtccgacacctgggacagactgctgaaagtgaggtggccctagagacactagagtcaccagccaccatcctcagagctttgaactccccattccaaaggggcacccacatttttttgaaagactggactggaatcttagcaaacaattgtaagtctcctccttaaaggccccttggaacatgcaggtattttctacgggtgtttgatgttcctgaagtggaagctgtgtgttggcgtgccacggtggggatttcgtgactctataatgattgttactccccctcccttttcaaattccaatgtgaccaattccggatcagggtgtgaggaggctggggctaaggggctcccctgaatatcttctctgctcacttccaccatctaagaggaaaaggtgagttgctcatgctgattaggattgaaatgatttgtttctcttcctaggatgaaaactaaatcaattaattattcaattaggtaagaagatctggttttttggtcaaagggaacatgttcggactggaaacatttctttacatttgcattcctccatttcgccagcacaagtcttgctaaatgtgatactgttgacatcctccagaatggccagaagtgcaattaacctcttaggtggcaaggaggcaggaagtgcctctttagttcttacatttctaatagccttgggtttatttgcaaaggaagcttgaaaaatatgagaaaagttgcttgaagtgcattacaggtgtttgtgaagtcacataatctacggggctagggcgagagaggccagggatttgttcacagatacttgaattaattcatccaaatgtactgaggttaccacacacttgactacggatgtgatcaacactaacaaggaaacaaattcaaggacaacctgtctttgagccagggcaggcctcagacaccctgcctgtggccccgcctccacttcatcctgcccggaatgccagtgctccgagctcagacagaggaagccctgcagaaagttccatcaggctgtttcctaaaggatgtgtgaacgggagatgatgcactgtgttttgaaagttgtcattttaaagcattttagcacagttcatagtccacagttgatgcagcatcctgagattttaaatcctgaagtgtgggtggcgcacacaccaagtagggagctagtcaggcagtttgcttaaggaacttttgttctctgtctcttttccttaaaattgggggtaaggagggaaggaagagggaaagagatgactaactaaaatcatttttacagcaaaaactgctcaaagccatttaaattatatcctcattttaaaagttacatttgcaaatatttctccctatgataatgcagtcgatagtgtgcactctttctctctctctctctctctcacacacacacacacacacacacacacacacacagagacacggcaccattctgcctggggcactggaacacattcctgggggtcaccgatggtcagagtcactagaagttacctgagtatctctgggaggcctcatgtctcctgtgggctttttaccaccactgtgcaggagaacagacagaggaaatgtgtctccctccaaggccccaaagcctcagagaaagggtgtttctggttttgccttagcaatgcatcggtctctgaggtgacactctggagtggttgaagggccacaaggtgcagggttaatactcttgccagttttgaaatatagatgctatggttcagattgtttttaatagaaaactaaaggggcaggggaagtgaaaggaaagatggaggttttgtgcggctcgatggggcatttggaacttctttttaaagtcatctcatggtctccagttttcagttggaactctggtgtttaacacttaagggagacaaaggctgtgtccatttggcaaaacttccttggccacgagactctaggtgatgtgtgaagctgggcagtctgtggtgtggagagcagccatctgtctggccattcagaggattctaaagacatggctggatgcgctgctgaccaacatcagcacttaaataaatgcaaatgcaacatttctccctctgggccttgaaaatccttgcccttatcatttggggtgaaggagacatttctgtccttggcttcccacagccccaacgcagtctgtgtatgattcctgggatccaacgagccctcctattttcacagtgttctgattgctctcacagcccaggcccatcgtctgttctctgaatgcagccctgttctcaacaacagggaggtcatggaacccctctgtggaacccacaaggggagaaatgggtgataaagaatccagttcctcaaaaccttccctggcaggctgggtccctctcctgctgggtggtgctttctcttgcacaccactcccaccacggggggagagccagcaacccaaccagacagctcaggttgtgcatctgatggaaaccactgggctcaaacacgtgctttattctcctgtttatttttgctgttactttgaagcatggaaattcttgtttgggggatcttggggctacagtagtgggtaaacaaatgcccaccggccaagaggccattaacaaatcgtccttgtcctgaggggccccagcttgctcgggcgtggcacagtggggaatccaagggtcacagtatggggagaggtgcaccctgccacctgctaacttctcgctagacacagtgtttctgcccaggtgacctgttcagcagcagaacaagccagggccatggggacgggggaagttttcacttggagatggacaccaagacaatgaagatttgttgtccaaataggtcaataattctgggagactcttggaaaaaactgaatatattcaggaccaactctctccctcccctcatcccacatctcaaagcagacaatgtaaagagagaacatctcacacacccagctcgccatgcctactcattcctgaatttcaggtgccatcactgctctttctttcttctttgtcatttgagaaaggatgcaggaggacaattcccacagataatctgaggaatgcagaaaaaccagggcaggacagttatcgacaatgcattagaacttggtgagcatcctctgtagagggactccacccctgctcaacagcttggcttccaggcaagaccaaccacatctggtctctgccttcggtggcccacacacctaagcgtcatcgtcattgccatagcatcatgatgcaacacatctacgtgtagcactacgacgttatgtttgggtaatgtggggatgaactgcatgaggctctgattaaggatgtggggaagtgggctgcggtcactgtcggccttgcaaggccacctggaggcctgtctgttagccagtggtggaggagcaaggcttcaggaagggccagccacatgccatcttccctgcgatcaggcaaaaaagtggaattaaaaagtcaaacctttatatgcatgtgttatgtccattttgcaggatgaactgagtttaaaagaatttttttttctcttcaagttgctttgtcttttccatcctcatcacaagcccttgtttgagtgtcttatccctgagcaatctttcgatggatggagatgatcattaggtacttttgtttcaacctttattcctgtaaatatttctgtgaaaactaggagaacagagatgagatttgacaaaaaaaaattgaattaaaaataacacagtctttttaaaactaacataggaaagcctttcctattatttctcttcttagcttctccattgtctaaatcaggaaaacaggaaaacacagctttctagcagctgcaaaatggtttaatgccccctacatatttccatcaccttgaacaatagctttagcttgggaatctgagatatgatcccagaaaacatctgtctctacttcggctgcaaaacccatggtttaaatctatatggtttgtgcattttctcaactaaaaatagagatgataatccgaattctccatatattcactaatcaaagacactattttcatactagattcctgagacaaatactcactgaagggcttgtttaaaaataaattgtgttttggtctgttcttgtagataatgcccttctattttaggtagaagctctggaatccctttattgtgctgttgctcttatctgcaaggtggcaagcagttcttttcagcagattttgcccactattcctctgagctgaagttctttgcatagatttggcttaagcttgaattagatccctgcaaaggcttgctctgtgatgtcagatgtaattgtaaatgtcagtaatcacttcatgaatgctaaatgagaatgtaagtatttttaaatgtgtgtatttcaaatttgtttgactaattctggaattacaagatttctatgcaggatttaccttcatcctgtgcatgtttcccaaactgtgaggagggaaggctcagagatcgagcttctcctctgagttctaacaaaatggtgctttgagggtcagcctttaggaaggtgcagctttgttgtcctttgagctttctgttatgtgcctatcctaataaactcttaaacacatt

SEQ ID NO: 16 - DNA, 7680 bp, Homo sapiens
gcggacactcctctcggctcctccccggcagcggcggcggctcggagcgggctccggggctcgggtgcagcggccagcgggcctggcggcgaggattacccggggaagtggttgtctcctggctggagccgcgagacgggcgctcagggcgcggggccggcggcggcgaacgagaggacggactctggcggccgggtcgttggccgggggagcgcgggcaccgggcgagcaggccgcgtcgcgctcaccatggtcagctactgggacaccggggtcctgctgtgcgcgctgctcagctgtctgcttctcacaggatctagttcaggttcaaaattaaaagatcctgaactgagtttaaaaggcacccagcacatcatgcaagcaggccagacactgcatctccaatgcaggggggaagcagcccataaatggtctttgcctgaaatggtgagtaaggaaagcgaaaggctgagcataactaaatctgcctgtggaagaaatggcaaacaattctgcagtactttaaccttgaacacagctcaagcaaaccacactggcttctacagctgcaaatatctagctgtacctacttcaaagaagaaggaaacagaatctgcaatctatatatttattagtgatacaggtagacctttcgtagagatgtacagtgaaatccccgaaattatacacatgactgaaggaagggagctcgtcattccctgccgggttacgtcacctaacatcactgttactttaaaaaagtttccacttgacactttgatccctgatggaaaacgcataatctgggacagtagaaagggcttcatcatatcaaatgcaacgtacaaagaaatagggcttctgacctgtgaagcaacagtcaatgggcatttgtataagacaaactatctcacacatcgacaaaccaatacaatcatagatgtccaaataagcacaccacgcccagtcaaattacttagaggccatactcttgtcctcaattgtactgctaccactcccttgaacacgagagttcaaatgacctggagttaccctgatgaaaaaaataagagagcttccgtaaggcgacgaattgaccaaagcaattcccatgccaacatattctacagtgttcttactattgacaaaatgcagaacaaagacaaaggactttatacttgtcgtgtaaggagtggaccatcattcaaatctgttaacacctcagtgcatatatatgataaagcattcatcactgtgaaacatcgaaaacagcaggtgcttgaaaccgtagctggcaagcggtcttaccggctctctatgaaagtgaaggcatttccctcgccggaagttgtatggttaaaagatgggttacctgcgactgagaaatctgctcgctatttgactcgtggctactcgttaattatcaaggacgtaactgaagaggatgcagggaattatacaatcttgctgagcataaaacagtcaaatgtgtttaaaaacctcactgccactctaattgtcaatgtgaaaccccagatttacgaaaaggccgtgtcatcgtttccagacccggctctctacccactgggcagcagacaaatcctgacttgtaccgcatatggtatccctcaacctacaatcaagtggttctggcacccctgtaaccataatcattccgaagcaaggtgtgacttttgttccaataatgaagagtcctttatcctggatgctgacagcaacatgggaaacagaattgagagcatcactcagcgcatggcaataatagaaggaaagaataagatggctagcaccttggttgtggctgactctagaatttctggaatctacatttgcatagcttccaataaagttgggactgtgggaagaaacataagcttttatatcacagatgtgccaaatgggtttcatgttaacttggaaaaaatgccgacggaaggagaggacctgaaactgtcttgcacagttaacaagttcttatacagagacgttacttggattttactgcggacagttaataacagaacaatgcactacagtattagcaagcaaaaaatggccatcactaaggagcactccatcactcttaatcttaccatcatgaatgtttccctgcaagattcaggcacctatgcctgcagagccaggaatgtatacacaggggaagaaatcctccagaagaaagaaattacaatcagagatcaggaagcaccatacctcctgcgaaacctcagtgatcacacagtggccatcagcagttccaccactttagactgtcatgctaatggtgtccccgagcctcagatcacttggtttaaaaacaaccacaaaatacaacaagagcctggaattattttaggaccaggaagcagcacgctgtttattgaaagagtcacagaagaggatgaaggtgtctatcactgcaaagccaccaaccagaagggctctgtggaaagttcagcatacctcactgttcaaggaacctcggacaagtctaatctggagctgatcactctaacatgcacctgtgtggctgcgactctcttctggctcctattaaccctccttatccgaaaaatgaaaaggtcttcttctgaaataaagactgactacctatcaattataatggacccagatgaagttcctttggatgagcagtgtgagcggctcccttatgatgccagcaagtgggagtttgcccgggagagacttaaactgggcaaatcacttggaagaggggcttttggaaaagtggttcaagcatcagcatttggcattaagaaatcacctacgtgccggactgtggctgtgaaaatgctgaaagagggggccacggccagcgagtacaaagctctgatgactgagctaaaaatcttgacccacattggccaccatctgaacgtggttaacctgctgggagcctgcaccaagcaaggagggcctctgatggtgattgttgaatactgcaaatatggaaatctctccaactacctcaagagcaaacgtgacttattttttctcaacaaggatgcagcactacacatggagcctaagaaagaaaaaatggagccaggcctggaacaaggcaagaaaccaagactagatagcgtcaccagcagcgaaagctttgcgagctccggctttcaggaagataaaagtctgagtgatgttgaggaagaggaggattctgacggtttctacaaggagcccatcactatggaagatctgatttcttacagttttcaagtggccagaggcatggagttcctgtcttccagaaagtgcattcatcgggacctggcagcgagaaacattcttttatctgagaacaacgtggtgaagatttgtgattttggccttgcccgggatatttataagaaccccgattatgtgagaaaaggagatactcgacttcctctgaaatggatggctcccgaatctatctttgacaaaatctacagcaccaagagcgacgtgtggtcttacggagtattgctgtgggaaatcttctccttaggtgggtctccatacccaggagtacaaatggatgaggacttttgcagtcgcctgagggaaggcatgaggatgagagctcctgagtactctactcctgaaatctatcagatcatgctggactgctggcacagagacccaaaagaaaggccaagatttgcagaacttgtggaaaaactaggtgatttgcttcaagcaaatgtacaacaggatggtaaagactacatcccaatcaatgccatactgacaggaaatagtgggtttacatactcaactcctgccttctctgaggacttcttcaaggaaagtatttcagctccgaagtttaattcaggaagctctgatgatgtcagatatgtaaatgctttcaagttcatgagcctggaaagaatcaaaacctttgaagaacttttaccgaatgccacctccatgtttgatgactaccagggcgacagcagcactctgttggcctctcccatgctgaagcgcttcacctggactgacagcaaacccaaggcctcgctcaagattgacttgagagtaaccagtaaaagtaaggagtcggggctgtctgatgtcagcaggcccagtttctgccattccagctgtgggcacgtcagcgaaggcaagcgcaggttcacctacgaccacgctgagctggaaaggaaaatcgcgtgctgctccccgcccccagactacaactcggtggtcctgtactccaccccacccatctagagtttgacacgaagccttatttctagaagcacatgtgtatttatacccccaggaaactagcttttgccagtattatgcatatataagtttacacctttatctttccatgggagccagctgctttttgtgatttttttaatagtgctttttttttttgactaacaagaatgtaactccagatagagaaatagtgacaagtgaagaacactactgctaaatcctcatgttactcagtgttagagaaatccttcctaaacccaatgacttccctgctccaacccccgccacctcagggcacgcaggaccagtttgattgaggagctgcactgatcacccaatgcatcacgtaccccactgggccagccctgcagcccaaaacccagggcaacaagcccgttagccccaggggatcactggctggcctgagcaacatctcgggagtcctctagcaggcctaagacatgtgaggaggaaaaggaaaaaaagcaaaaagcaagggagaaaagagaaaccgggagaaggcatgagaaagaatttgagacgcaccatgtgggcacggagggggacggggctcagcaatgccatttcagtggcttcccagctctgacccttctacatttgagggcccagccaggagcagatggacagcgatgaggggacattttctggattctgggaggcaagaaaaggacaaatatcttttttggaactaaagcaaattttagacctttacctatggaagtggttctatgtccattctcattcgtggcatgttttgatttgtagcactgagggtggcactcaactctgagcccatacttttggctcctctagtaagatgcactgaaaacttagccagagttaggttgtctccaggccatgatggccttacactgaaaatgtcacattctattttgggtattaatatatagtccagacacttaactcaatttcttggtattattctgttttgcacagttagttgtgaaagaaagctgagaagaatgaaaatgcagtcctgaggagagttttctccatatcaaaacgagggctgatggaggaaaaaggtcaataaggtcaagggaagaccccgtctctataccaaccaaaccaattcaccaacacagttgggacccaaaacacaggaagtcagtcacgtttccttttcatttaatggggattccactatctcacactaatctgaaaggatgtggaagagcattagctggcgcatattaagcactttaagctccttgagtaaaaaggtggtatgtaatttatgcaaggtatttctccagttgggactcaggatattagttaatgagccatcactagaagaaaagcccattttcaactgctttgaaacttgcctggggtctgagcatgatgggaatagggagacagggtaggaaagggcgcctactcttcagggtctaaagatcaagtgggccttggatcgctaagctggctctgtttgatgctatttatgcaagttagggtctatgtatttaggatgcgcctactcttcagggtctaaagatcaagtgggccttggatcgctaagctggctctgtttgatgctatttatgcaagttagggtctatgtatttaggatgtctgcaccttctgcagccagtcagaagctggagaggcaacagtggattgctgcttcttggggagaagagtatgcttccttttatccatgtaatttaactgtagaacctgagctctaagtaaccgaagaatgtatgcctctgttcttatgtgccacatccttgtttaaaggctctctgtatgaagagatgggaccgtcatcagcacattccctagtgagcctactggctcctggcagcggcttttgtggaagactcactagccagaagagaggagtgggacagtcctctccaccaagatctaaatccaaacaaaagcaggctagagccagaagagaggacaaatctttgttgttcctcttctttacacatacgcaaaccacctgtgacagctggcaattttataaatcaggtaactggaaggaggttaaactcagaaaaaagaagacctcagtcaattctctacttttttttttttttttccaaatcagataatagcccagcaaatagtgataacaaataaaaccttagctgttcatgtcttgatttcaataattaattcttaatcattaagagaccataataaatactccttttcaagagaaaagcaaaaccattagaattgttactcagctccttcaaactcaggtttgtagcatacatgagtccatccatcagtcaaagaatggttccatctggagtcttaatgtagaaagaaaaatggagacttgtaataatgagctagttacaaagtgcttgttcattaaaatagcactgaaaattgaaacatgaattaactgataatattccaatcatttgccatttatgacaaaaatggttggcactaacaaagaacgagcacttcctttcagagtttctgagataatgtacgtggaacagtctgggtggaatggggctgaaaccatgtgcaagtctgtgtcttgtcagtccaagaagtgacaccgagatgttaattttagggacccgtgccttgtttcctagcccacaagaatgcaaacatcaaacagatactcgctagcctcatttaaattgattaaaggaggagtgcatctttggccgacagtggtgtaactgtgtgtgtgtgtgtgtgtgtgtgtgtgtgtgtgtgtgtgtgggtgtgggtgtatgtgtgttttgtgcataactatttaaggaaactggaattttaaagttacttttatacaaaccaagaatatatgctacagatataagacagacatggtttggtcctatatttctagtcatgatgaatgtattttgtataccatcttcatataatatacttaaaaatatttcttaattgggatttgtaatcgtaccaacttaattgataaacttggcaactgcttttatgttctgtctccttccataaatttttcaaaatactaattcaacaaagaaaaagctcttttttttcctaaaataaactcaaatttatccttgtttagagcagagaaaaattaagaaaaactttgaaatggtctcaaaaaattgctaaatattttcaatggaaaactaaatgttagtttagctgattgtatggggttttcgaacctttcactttttgtttgttttacctatttcacaactgtgtaaattgccaataattcctgtccatgaaaatgcaaattatccagtgtagatatatttgaccatcaccctatggatattggctagttttgcctttattaagcaaattcatttcagcctgaatgtctgcctatatattctctgctctttgtattctcctttgaacccgttaaaacatcctgtggcactc

SEQ ID NO: 17 - DNA, 1418 bp, Homo sapiens
aactgtgcgaaccagacccggcagccttgctcagttcagcatagcggagcggatccgatcggatcggagcacaccggagcaggctcatcgagaaggcgtctgcgagaccatggagaacggatacacctatgaagattataagaacactgcagaatggcttctgtctcatactaagcaccgacctcaagttgcaataatctgtggttctggattaggaggtctgactgataaattaactcaggcccagatctttgactacagtgaaatccccaactttcctcgaagtacagtgccaggtcatgctggccgactggtgtttgggttcctgaatggcagggcctgtgtgatgatgcagggcaggttccacatgtatgaagggtacccactctggaaggtgacattcccagtgagggttttccaccttctgggtgtggacaccctggtagtcaccaatgcagcaggagggctgaaccccaagtttgaggttggagatatcatgctgatccgtgaccatatcaacctacctggtttcagtggtcagaaccctctcagagggcccaatgatgaaaggtttggagatcgtttccctgccatgtctgatgcctacgaccggactatgaggcagagggctctcagtacctggaaacaaatgggggagcaacgtgagctacaggaaggcacctatgtgatggtggcaggccccagctttgagactgtggcagaatgtcgtgtgctgcagaagctgggagcagacgctgttggcatgagtacagtaccagaagttatcgttgcacggcactgtggacttcgagtctttggcttctcactcatcactaacaaggtcatcatggattatgaaagcctggagaaggccaaccatgaagaagtcttagcagctggcaaacaagctgcacagaaattggaacagtttgtctccattcttatggccagcattccactccctgacaaagccagttgacctgccttggagtcgtctggcatctcccacacaagacccaagtagctgctaccttctttggccccttgctggagtcatgtgcctctgtccttaggttgtagcagaaaggaaaagattcctgtccttcacctttcccactttcttctaccagacccttctggtgccagatcctcttctcaaagctgggattacaggtgtgagcatagtgagaccttggcgctacaaaataaagctgttctcattcctgttctttcttacacaagagctggagcccgtgccctaccacacatctgtggagatgcccaggatttgactcgggccttagaactttgcatagcagctgctactagctctttgagataatacattccgaggggctcagttctgccttatctaaatcaccagagaccaaacaaggactaatccaatacctcttgga

SEQ ID NO: 18 - DNA, 1500 bp, Homo sapiens
aaagtctcgcccaaactttgttcggcacaaccagcgccgagggggcggcgcaggccaggtgggagggggcccgcagcgggcggccgtaccttcgcaaacgcccgcttcgtactcggtgagggagtcgccattgagcggggggcggatgacacaacgcagcccccggtcgcaggttccgtaaatcccgaaggtgccgccgcagctctcgttcctctggctggcgcacgtgtagcagcagccgcagacgccctgcacgatgctccccgggcagttcctgggctcctcgcacttggactcgtcacagggcaggcagaccagcgcccgggtgccggagcgcgccagcagcagcagcagccccagcagcgagaccaggaggtgcccgcagccggccaaccccctgtcccccgccaccaagtacatcctcctgcgccgccgccgcctcctcctcgcagccgggccgggagcggggcgggcgccctcccctgcgcggggcacacgcgccgccgccgccgcaccagcagcccgcggtcctcaccgcccctctcggggcccccggggcgcgcctcccctcgcggggcgaggcccccgccccttctgcgggccgcgccgaccccgagcccacgagccttggcgccggcggcagcttcccctcctcctcctcctcctcctcccgggagggagggggaaaaaagaaaaaagtttcctcccggcagctccggttcaacccaaacttctggcgcggcggcggcggtggctgctgcgctcggctccagcccgggccggcggcgcctcctccctctcctcctccgagtcggccggccccgcagcggcgcagcctccgggccggtccccgcctcccgagctgccgagtgggcgcggtggcgcagcacaagatccgcggcgtccgctccgcgcgccccgctcgcctcactcctgcgccgctcctccgggcgcttgtttatggctggagcctcagccgctcgggctgcgccctcccccatcctacctcctcccccagaccttccccccacccccacgcgccgcgcgccgctcattggctgccccccctccccggcccggccggccccctccgcctccccctccccctctcgggcggccgggcccttcctccctccctcacacgcctccacctcttcccgatctcctcctccccgagcccggcgcaccgagccggccgtgccaccgagctgcggctctggccccggcgccgcgggtgcgctgcggatgggcttggggcgcacccagcgagcagcgagagtcgcggtgtcccgggcgctcgctggcaccgtggccgcagcggccggcctgggagccaggagggcgaggcggctgcaccttcggggccagattggagttcgaagagtggcgggtaccccagaagctcggggccggggcgatggctgcagcctcgggagggtatcgccggatcgaactccgggaaagggaagcaaaggcatggaacctccgcacactggatga

SEQ ID NO: 19 - DNA, 1530 bp, Homo sapiens
atgcccccggaacagcatcatcagcccaacaaagtctcgcccaaactttgttcggcacaaccagcgccgagggggcggcgcaggccaggtgggagggggcccgcagcgggcggccgtaccttcgcaaacgcccgcttcgtactcggtgagggagtcgccattgagcggggggcggatgacacaacgcagcccccggtcgcaggttccgtaaatcccgaaggtgccgccgcagctctcgttcctctggctggcgcacgtgtagcagcagccgcagacgccctgcacgatgctccccgggcagttcctgggctcctcgcacttggactcgtcacagggcaggcagaccagcgcccgggtgccggagcgcgccagcagcagcagcagccccagcagcgagaccaggaggtgcccgcagccggccaaccccctgtcccccgccaccaagtacatcctcctgcgccgccgccgcctcctcctcgcagccgggccgggagcggggcgggcgccctcccctgcgcggggcacacgcgccgccgccgccgcaccagcagcccgcggtcctcaccgcccctctcggggcccccggggcgcgcctcccctcgcggggcgaggcccccgccccttctgcgggccgcgccgaccccgagcccacgagccttggcgccggcggcagcttcccctcctcctcctcctcctcctcccgggagggagggggaaaaaagaaaaaagtttcctcccggcagctccggttcaacccaaacttctggcgcggcggcggcggtggctgctgcgctcggctccagcccgggccggcggcgcctcctccctctcctcctccgagtcggccggccccgcagcggcgcagcctccgggccggtccccgcctcccgagctgccgagtgggcgcggtggcgcagcacaagatccgcggcgtccgctccgcgcgccccgctcgcctcactcctgcgccgctcctccgggcgcttgtttatggctggagcctcagccgctcgggctgcgccctcccccatcctacctcctcccccagaccttccccccacccccacgcgccgcgcgccgctcattggctgccccccctccccggcccggccggccccctccgcctccccctccccctctcgggcggccgggcccttcctccctccctcacacgcctccacctcttcccgatctcctcctccccgagcccggcgcaccgagccggccgtgccaccgagctgcggctctggccccggcgccgcgggtgcgctgcggatgggcttggggcgcacccagcgagcagcgagagtcgcggtgtcccgggcgctcgctggcaccgtggccgcagcggccggcctgggagccaggagggcgaggcggctgcaccttcggggccagattggagttcgaagagtggcgggtaccccagaagctcggggccggggcgatggctgcagcctcgggagggtatcgccggatcgaactccgggaaagggaagcaaaggcatggaacctccgcacactggatga

SEQ ID NO: 20 - DNA, 2935 bp, Homo sapiens
  modified_base (1528): n = g, a, c or t
atgaaaacagccgcactcactccgccgcgctctccgccaccgccaccactgcggccaccgccaatgaaacgcctcccgctcctagtggttttttccactttgttgaattgttcctatactcaaaattgcaccaagacaccttgtctcccaaatgcaaaatgtgaaatacgcaatggaattgaagcctgctattgcaacatgggattttcaggaaatggtgtcacaatttgtgaagatgataatgaatgtggaaatttaactcagtcctgtggcgaaaatgctaattgcactaacacagaaggaagttattattgtatgtgtgtacctggcttcagatccagcagtaaccaagacaggtttatcactaatgatggaaccgtctgtatagaaaatgtgaatgcaaactgccatttagataatgtctgtatagctgcaaatattaataaaactttaacaaaaatcagatccataaaagaacctgtggctttgctacaagaagtctatagaaattctgtgacagatctttcaccaacagatataattacatatatagaaatattagctgaatcatcttcattactaggttacaagaacaacactatctcagccaaggacaccctttctaactcaactcttactgaatttgtaaaaaccgtgaataattttgttcaaagggatacatttgtagtttgggacaagttatctgtgaatcataggagaacacatcttacaaaactcatgcacactgttgaacaagctactttaaggatatcccagagcttccaaaagaccacagagtttgatacaaattcaacggatatagctctcaaagttttcttttttgattcatataacatgaaacatattcatcctcatatgaatatggatggagactacataaatatatttccaaagagaaaagctgcatatgattcaaatggcaatgttgcagttgcatttttatattataagagtattggtcctttgctttcatcatctgacaacttcttattgaaacctcaaaattatgataattctgaagaggaggaaagagtcatatcttcagtaatttcagtctcaatgagctcaaacccacccacattatatgaacttgaaaaaataacatttacattaagtcatcgaaaggtcacagataggtataggagtctatgtgcattttggaattactcacctgataccatgaatggcagctggtcttcagagggctgtgagctgacatactcaaatgagacccacacctcatgccgctgtaatcacctgacacattttgcaattttgatgtcctctggtccttccattggtattaaagattataatattcttacaaggatcactcaactaggaataattatttcactgatttgtcttgccatatgcatttttaccttctggttcttcagtgaaattcaaagcaccaggacaacaattcacaaaaatctttgctgtagcctatttcttgctgaacttgtttttcttgttgggatcaatacaaatactaataagctcntttctgtttcaatcattgccggactgctacactacttctttttagctgcttttgcatggatgtgcattgaaggcatacatctctatctcattgttgtgggtgtcatctacaacaagggatttttgcacaagaatttttatatctttggctatctaagcccagccgtggtagttggattttcggcagcactaggatacagatattatggcacaacaaaagtatgttggcttagcaccgaaacacactttatttggagttttataggaccagcatgcctaatcattcttgttaatctcttggcttttggagtcatcatatacaaagtttttcgtcacactgcagggttgaaaccagaagttagttgctttgagaacataaggtcttgtgcaagaggagccctcgctcttctgttccttctcggcaccacctggatctttggggttctccatgttgtgcacgcatcagtggttacagcttacctcttcacagtcagcaatgctttccaggggatgttcatttttttattcctgtgtgttttatctagaaagattcaagaagaatattacagattgttcaaaaatgtcccctgttgttttggatgtttaaggtaaacatagagaatggtggataattacaactgcactaaaaataaaaattccaagctgtggatgaccaatgtataaaaatgactcatcaaattatccaattattaactactagacaaaaagtattttaaatcagtttttctgtttatgctataggaactgtagataataaggtaaaattatgtatcatatagatatactatgtttttctatgtgaaatagttctgtcaaaaatagtattgcagatatttggaaagtaattggtttctcaggagtgatatcactgcacccaaggaaagattttctttctaacacgagaagtatatgaatgtcctgaaggaaaccactggcttgatatttctgtgactcgtgttgcctttgaaactagtcccctaccacctcggtaatgagctccattacagaaagtggaacataagagaatgaaggggcagaatatcaaacagtgaaaagggaatgataagatgtattttgaatgaactgttttttctgtagactagctgagaaattgttgacataaaataaagaattgaagaaacacattttaccattttgtgaattgttctgaacttaaatgtccactaaaacaacttagacttctgtttgctaaatctgtttctttttctaatattctaaaaaaaaaaaaaaggtttmccycccaaattgaaaaaaaaagggaaaaaaaaatctgtttctaaggttagactgagatatatactatttccttacttatttcacagattgtgactttggatagttaatcagtaaaatataaatgtgtcga

SEQ ID NO: 21 - DNA, 3828 bp, Homo sapiens
aagacaacgtcactagcagtttctggagctacttgccaaggctgagtgtgagctgagcctgccccaccaccaagatgatcctgagcttgctgttcagccttgggggccccctgggctgggggctgctgggggcatgggcccaggcttccagtactagcctctctgatctgcagagctccaggacacctggggtctggaaggcagaggctgaggacaccagcaaggaccccgttggacgtaactggtgcccctacccaatgtccaagctggtcaccttactagctctttgcaaaacagagaaattcctcatccactcgcagcagccgtgtccgcagggagctccagactgccagaaagtcaaagtcatgtaccgcatggcccacaagccagtgtaccaggtcaagcagaaggtgctgacctctttggcctggaggtgctgccctggctacacgggccccaactgcgagcaccacgattccatggcaatccctgagcctgcagatcctggtgacagccaccaggaacctcaggatggaccagtcagcttcaaacctggccaccttgctgcagtgatcaatgaggttgaggtgcaacaggaacagcaggaacatctgctgggagatctccagaatgatgtgcaccgggtggcagacagcctgccaggcctgtggaaagccctgcctggtaacctcacagctgcagtgatggaagcaaatcaaacagggcacgagttccctgatagatccttggagcaggtgctgctaccccacgtggacaccttcctacaagtgcatttcagccccatctggaggagctttaaccaaagcctgcacagccttacccaggccataagaaacctgtctcttgacgtggaggccaaccgccaggccatctccagagtccaggacagtgccgtggccagggctgacttccaggagcttggtgccaaatttgaggccaaggtccaggagaacactcagagagtgggtcagctgcgacaggacgtggaggaccgcctgcacgcccagcactttaccctgcaccgctcgatctcagagctccaagccgatgtggacaccaaattgaagaggctgcacaaggctcaggaggccccagggaccaatggcagtctggtgttggcaacgcctggggctggggcaaggcctgagccggacagcctgcaggccaggctgggccagctgcagaggaacctctcagagctgcacatgaccacggcccgcagggaggaggagttgcagtacaccctggaggacatgagggccaccctgacccggcacgtggatgagatcaaggaactgtactccgaatcggacgagactttcgatcagattagcaaggtggagcggcaggtggaggagctgcaggtgaaccacacggcgctccgtgagctgcgcgtgatcctgatggagaagtctctgatcatggaggagaacaaggaggaggtggagcggcagctcctggagctcaacctcacgctgcagcacctgcagggtggccatgccgacctcatcaagtacgtgaaggactgcaattgccagaagctctatttagacctggacgtcatccgggagggccagagggacgccacgcgtgccctggaggagacccaggtgagcctggacgagcggcggcagctggacggctcctccctgcaggccctgcagaacgccgtggacgccgtgtcgctggccgtggacgcgcacaaagcggagggcgagcgggcgcgggcggccacgtcgcggctccggagccaagtgcaggcgctggatgacgaggtgggcgcgctgaaggcggccgcggccgaggcccgccacgaggtgcgccagctgcacagcgccttcgccgccctgctggaggacgcgctgcggcacgaggcggtgctggccgcgctcttcggggaggaggtgctggaggagatgtctgagcagacgccgggaccgctgcccctgagctacgagcagatccgcgtggccctgcaggacgccgctagcgggctgcaggagcaggcgctcggctgggacgagctggccgcccgagtgacggccctggagcaggcctcggagcccccgcggccggcagagcacctggagcccagccacgacgcgggccgcgaggaggccgccaccaccgccctggccgggctggcgcgggagctccagagcctgagcaacgacgtcaagaatgtcgggcggtgctgcgaggcygaggccggggccggggccgcctccctcaacgcctcccttgacggcctccacaacgcactcttcgccactcagcgcagcttggagcagcaccagcggctcttccacagcctctttgggaacttccaagggctcatggaagccaacgtcagcctggacctggggaagctgcagaccatgctgagcaggaaagggaagaagcagcagaaagacctggaagctccccggaagagggacaagaaggaagcggagcctttggtggacatacgggtcacagggcctgtgccaggtgccttgggcgcggcgctctgggaggcagrwtcccctgtggccttctatgccagcttttcagaagggacggctgccctgcagacagtgaagttcaacaccacatacatcaacattggcagcagctacttccctgaacatggctacttccgagcccctgagcgtggtgtctacctgtttgcagtgagcgttgaatttggcccagggccaggcaccgggcagctggtgtttggaggtcaccatcggactccagtctgtaccactgggcaggggagtggaagcacagcaacggtctttgccatggctgagctgcagaagggtgagcgagtatggtttgagttaacccagggatcaataacaaagagaagcctgtcgggcactgcatttgggggcttcctgatgtttaagacctgaaccccagccccaatctgatcagacatcatggactcgcccagctctcctcggcctggggctctggccaaggatgggctggaggtcattcagttggtctgtctcttccctggaaaccttctgcaaagatggtgtggtgtacgtggcttccctgtaaccacatggggcttggccatttctccatgatgagaaggactggaatgcttctccgggcaggacatggtcctaggaagcctgaaccttggcttggcatgccttctcagacagcacggcctgggctccaactcttcaccacaccctgtattctacaacttctttggtgttttgctcctcctgtggttggaaacttctgtacaacactttaaacttttctcttgcttcctcttctcttctcccttatcgtatgatagaaagacattcttccccaggaggaatgtttaaaatggaggcaacattttggccaacattggaaagcactagagggcaatgggattaaaccaacctgcttggtctctattagtcagtaatgaagacgacagcctggccaaccaagggaaaggaaattagtatctttagtttcagtcattccttgtaggatatggtttagctgtgcccccacctaaaatatcatcttgaattgtaatccctataatccccacatcaagggagagatcaggtggaggtaattggatcttgggggcggttcccccatgctgttcttgtgatagttctcacgagatctgatgattttataagtttgatagttcctcctgtgttcattctccttcctgccaccttgtgaagatgccttggttcctcttcactgtctgccatgattgtaagtttcctgaggcctccccagccatgtggaacagtgagtcaattaaacctctttcctttataaatt

SEQ ID NO: 22 - DNA, 238 bp, Homo sapiens
atgggcaaagacttcatgactaaaacaccaaaagcatttgcaacaaaagccaaaattgacaaatgggatctaattaaactaaagagcttctgcacagcaaaagaaactatcatcagagtgaacagtcaacctacagactggcagaaaacttttgcaatctatccatctgacaaaggggtaatagccagaatctacaaggagcttgaacaaatttataagaaaaaaaaaccaacaaaaa

SEQ ID NO: 23 - DNA, 1706 bp, Homo sapiens
cgctccgcacacatttcctgtcgcggcctaagggaaactgttggccgctgggcccgcggggggattcttggcagttggggggtccgtcgggagcgagggcggaggggaagggagggggaaccgggttggggaagccagctgtagagggcggtgaccgcgctccagacacagctctgcgtcctcgagcgggacagatccaagttgggagcagctctgcgtgcggggcctcagagaatgaggccggcgttcgccctgtgcctcctctggcaggcgctctggcccgggccgggcggcggcgaacaccccactgccgaccgtgctggctgctcggcctcgggggcctgctacagcctgcaccacgctaccatgaagcggcaggcggccgaggaggcctgcatcctgcgaggtggggcgctcagcaccgtgcgtgcgggcgccgagctgcgcgctgtgctcgcgctcctgcgggcaggcccagggcccggagggggctccaaagacctgctgttctgggtcgcactggagcgcaggcgttcccactgcaccctggagaacgagcctttgcggggtttctcctggctgtcctccgaccccggcggtctcgaaagcgacacgctgcagtgggtggaggagccccaacgctcctgcaccgcgcggagatgcgcggtactccaggccaccggtggggtcgagcccgcagctggaaggagatgcgatgccacctgcgcgccaacggctacctgtgcaagtaccagtttgaggtcttgtgtcctgcgccgcgccccggggccgcctctaacttgagctatcgcgcgcccttccagctgcacagcgccgctctggacttcagtccacctgggaccgaggtgagtgcgctctgccggggacagctcccgatctcagttacttgcatcgcggacgaaatcggcgctcgctgggacaaactctcgggcgatgtgttgtgtccctgccccgggaggtacctccgtgctggcaaatgcgcagagctccctaactgcctagacgacttgggaggctttgcctgcgaatgtgctacgggcttcgagctggggaaggacggccgctcttgtgtgaccagtggggaaggacagccgacccttggggggaccggggtgcccaccaggcgcccgccggccactgcaaccagccccgtgccgcagagaacatggccaatcagggtcgacgagaagctgggagagacaccacttgtccctgaacaagacaattcagtaacatctattcctgagattcctcgatggggatcacagagcacgatgtctacccttcaaatgtcccttcaagccgagtcaaaggccactatcaccccatcagggagcgtgatttccaagtttaattctacgacttcctctgccactcctcaggctttcgactcctcctctgccgtggtcttcatatttgtgagcacagcagtagtagtgttggtgatcttgaccatgacagtactggggcttgtcaagctctgctttcacgaaagcccctcttcccagccaaggaaggagtctatgggcccgccgggcctggagagtgatcctgagcccgctgctttgggctccagttctgcacattgcacaaacaatggggtgaaagtcggggactgtgatctgcgggacagagcagagggtgccttgctggcggagtcccctcttggctctagtgatgcatag

SEQ ID NO: 24 - DNA, 1944 bp, Homo sapiens
atgggcaaagacttcatgactaaaacaccaaaagcatttgcaacaaaagccaaaattgacaaatgggatctaattaaactaaagagcttctgcacagcaaaagaaactatcatcagagtgaacagtcaacctacagactggcagaaaacttttgcaatctatccatctgacaaaggggtaatagccagaatctacaaggagcttgaacaaatttataagaaaaaaaaaccaacaaaaacgctccgcacacatttcctgtcgcggcctaagggaaactgttggccgctgggcccgcggggggattcttggcagttggggggtccgtcgggagcgagggcggaggggaagggagggggaaccgggttggggaagccagctgtagagggcggtgaccgcgctccagacacagctctgcgtcctcgagcgggacagatccaagttgggagcagctctgcgtgcggggcctcagagaatgaggccggcgttcgccctgtgcctcctctggcaggcgctctggcccgggccgggcggcggcgaacaccccactgccgaccgtgctggctgctcggcctcgggggcctgctacagcctgcaccacgctaccatgaagcggcaggcggccgaggaggcctgcatcctgcgaggtggggcgctcagcaccgtgcgtgcgggcgccgagctgcgcgctgtgctcgcgctcctgcgggcaggcccagggcccggagggggctccaaagacctgctgttctgggtcgcactggagcgcaggcgttcccactgcaccctggagaacgagcctttgcggggtttctcctggctgtcctccgaccccggcggtctcgaaagcgacacgctgcagtgggtggaggagccccaacgctcctgcaccgcgcggagatgcgcggtactccaggccaccggtggggtcgagcccgcagctggaaggagatgcgatgccacctgcgcgccaacggctacctgtgcaagtaccagtttgaggtcttgtgtcctgcgccgcgccccggggccgcctctaacttgagctatcgcgcgcccttccagctgcacagcgccgctctggacttcagtccacctgggaccgaggtgagtgcgctctgccggggacagctcccgatctcagttacttgcatcgcggacgaaatcggcgctcgctgggacaaactctcgggcgatgtgttgtgtccctgccccgggaggtacctccgtgctggcaaatgcgcagagctccctaactgcctagacgacttgggaggctttgcctgcgaatgtgctacgggcttcgagctggggaaggacggccgctcttgtgtgaccagtggggaaggacagccgacccttggggggaccggggtgcccaccaggcgcccgccggccactgcaaccagccccgtgccgcagagaacatggccaatcagggtcgacgagaagctgggagagacaccacttgtccctgaacaagacaattcagtaacatctattcctgagattcctcgatggggatcacagagcacgatgtctacccttcaaatgtcccttcaagccgagtcaaaggccactatcaccccatcagggagcgtgatttccaagtttaattctacgacttcctctgccactcctcaggctttcgactcctcctctgccgtggtcttcatatttgtgagcacagcagtagtagtgttggtgatcttgaccatgacagtactggggcttgtcaagctctgctttcacgaaagcccctcttcccagccaaggaaggagtctatgggcccgccgggcctggagagtgatcctgagcccgctgctttgggctccagttctgcacattgcacaaacaatggggtgaaagtcggggactgtgatctgcgggacagagcagagggtgccttgctggcggagtcccctcttggctctagtgatgcatag

SEQ ID NO: 25 - DNA, 1408 bp, Homo sapiens
aaatgggattgagttaaaactattttattttaaatatacattttaaagcagttcttttttttttttttttttttattatacacacacttcaagagaatatgcacagtctaggccgggcacggtggctcacgcctgtaatcccagcactttgggaggccgaggcatgtggatcacctgaggtcaggagtttgagaccagcctagacaacatggtgaaaccttgtctctatgaaaaatacaaaatttgctgggagtggtggtgcatgcctgtaatcccagctacttggaaggctgaggcaggagaatgtcttgaacctaggaggtggaggttgcagtgagctgagattgcaccattgcactccagcctgtgcaacaaaagtgaaactccatttcaagaaaaaaaaaaaaaaaagaatatgcacagtctgaatgtataccaggagtgtgagagacacatgcccacttcatgcaactcctaaactcaaagtctaaatcagatatttttattaacaatgacaacttgttgccaactccctgtttctaatcaccaaagacccagggtacctaaaaggactttgcaaccaagcaaagtcactgtcttcaaatctggatacacactttcccctctgtagattcaaaaggtgcttccttcccggctgtctccagcttccttactctcttttctgggatttctttttcttctttctttctggctcttcctccactggctgaactgggtcccctaactgaaacagcccctgacttagcccaagcatgcttcctttagctgctgtgagaattttgtcttcctcaccagccaggtcctcaaggcaaagtcctcagccagtgctttaagagcaacttcccgcaaatcagaaactcactgtgattccaaaaatgtttctgagccctggacccctgcccccaaaatattttcatctttcccccaaacctcctttaaaggagcatgcataacagtgtgctgaaagacagttgttggttttttgattttagcatattatttcctgtatgaaatatgttttatataatctcctattatttttatcttatgttttgtattgttgataaatccctttttgtccttctaagatgttctattgtaaaatcacttataaggtatgattactctttatgctattactttatatgccatttgggtaataaatagtaaatggttgatgatatgattgactgatgcgcagtccagagcatgtatgaataatctcataaaacagtatcacagacattaagctaaactgtttcgtttttttgaaagaacaactcatactttggaacagttgtcaatattaatttgttgcaaatatttaatttaaataaacatttttgtaccatgaaaaaaaaaaaaaaaaaaaaaaaaaaaaaaaaaa

SEQ ID NO: 26 - DNA, 3166 bp, Homo sapiens
gtccgcgcgtgtccgcgcccgcgtgtgccagcgcgcgtgccttggccgtgcgcgccgagccgggtcgcactaactccctcggcgccgacggcggcgctaacctctcggttattccaggatctttggagacccgaggaaagccgtgttgaccaaaagcaagacaaatgactcacagagaaaaaagatggcagaaccaagggcaactaaagccgtcaggttctgaacagctggtagatgggctggcttactgaaggacatgattcagactgtcccggacccagcagctcatatcaaggaagccttatcagttgtgagtgaggaccagtcgttgtttgagtgtgcctacggaacgccacacctggctaagacagagatgaccgcgtcctcctccagcgactatggacagacttccaagatgagcccacgcgtccctcagcaggattggctgtctcaacccccagccagggtcaccatcaaaatggaatgtaaccctagccaggtgaatggctcaaggaactctcctgatgaatgcagtgtggccaaaggcgggaagatggtgggcagcccagacaccgttgggatgaactacggcagctacatggaggagaagcacatgccacccccaaacatgaccacgaacgagcgcagagttatcgtgccagcagatcctacgctatggagtacagaccatgtgcggcagtggctggagtgggcggtgaaagaatatggccttccagacgtcaacatcttgttattccagaacatcgatgggaaggaactgtgcaagatgaccaaggacgacttccagaggctcacccccagctacaacgccgacatccttctctcacatctccactacctcagagagactcctcttccacatttgacttcagatgatgttgataaagccttacaaaactctccacggttaatgcatgctagaaacacagatttaccatatgagccccccaggagatcagcctggaccggtcacggccaccccacgccccagtcgaaagctgctcaaccatctccttccacagtgcccaaaactgaagaccagcgtcctcagttagatccttatcagattcttggaccaacaagtagccgccttgcaaatccaggcagtggccagatccagctttggcagttcctcctggagctcctgtcggacagctccaactccagctgcatcacctgggaaggcaccaacggggagttcaagatgacggatcccgacgaggtggcccggcgctggggagagcggaagagcaaacccaacatgaactacgataagctcagccgcgccctccgttactactatgacaagaacatcatgaccaaggtccatgggaagcgctacgcctacaagttcgacttccacgggatcgcccaggccctccagccccaccccccggagtcatctctgtacaagtacccctcagacctcccgtacatgggctcctatcacgcccacccacagaagatgaactttgtggcgccccaccctccagccctccccgtgacatcttccagtttttttgctgccccaaacccatactggaattcaccaactgggggtatataccccaacactaggctccccaccagccatatgccttctcatctgggcacttactactaaagacctggcggaggcttttcccatcagcgtgcattcaccagcccatcgccacaaactctatcggagaacatgaatcaaaagtgcctcaagaggaatgaaaaaagctttactggggctggggaaggaagccggggaagagatccaaagactcttgggagggagttactgaagtcttactacagaaatgaggaggatgctaaaaatgtcacgaatatggacatatcatctgtggactgaccttgtaaaagacagtgtatgtagaagcatgaagtcttaaggacaaagtgccaaagaaagtggtcttaagaaatgtataaactttagagtagagtttgaatcccactaatgcaaactgggatgaaactaaagcaatagaaacaacacagttttgacctaacataccgtttataatgccattttaaggaaaactacctgtatttaaaaatagtttcatatcaaaaacaagagaaaagacacgagagagactgtggcccatcaacagacgttgatatgcaactgcatggcatgtgctgttttggttgaaatcaaatacattccgtttgatggacagctgtcagctttctcaaactgtgaagatgacccaaagtttccaactcctttacagtattaccgggactatgaactaaaaggtgggactgaggatgtgtatagagtgagcgtgtgattgtagacagaggggtgaagaaggaggaggaagaggcagagaaggaggagaccaggctgggaaagaaacttctcaagcaatgaagactggactcaggacatttggggactgtgtacaatgagttatggagactcgagggttcatgcagtcagtgttataccaaacccagtgttaggagaaaggacacagcgtaatggagaaagggaagtagtagaattcagaaacaaaaatgcgcatctctttctttgtttgtcaaatgaaaattttaactggaattgtctgatatttaagagaaacattcaggacctcatcattatgtgggggctttgttctccacagggtcaggtaagagatggccttcttggctgccacaatcagaaatcacgcaggcattttgggtaggcggcctccagttttcctttgagtcgcgaacgctgtgcgtttgtcagaatgaagtatacaagtcaatgtttttccccctttttatataataattatataacttatgcatttatacactacgagttgatctcggccagccaaagacacacgacaaaagagacaatcgatataatgtggccttgaattttaactctgtatgcttaatgtttacaatatgaagttattagttcttagaatgcagaatgtatgtaataaaataagcttggcctagcatggcaaatcagatttatacaggagtctgcatttgcactttttttagtgactaaagttgcttaatgaaaacatgtgctgaatgttgtggattttgtgttataatttactttgtccaggaacttgtgcaagggagagccaaggaaataggatgtttggcaccc

SEQ ID NO: 27 - DNA, 4289 bp, Homo sapiens
aggaaacggtttattaggagggagtggtggagctgggccaggcaggaagacgctggaataagaaacatttttgctccagcccccatcccagtcccgggaggctgccgcgccagctgcgccgagcgagcccctccccggctccagcccggtccggggccgcgccggaccccagcccgccgtccagcgctggcggtgcaactgcggccgcgcggtggaggggaggtggccccggtccgccgaaggctagcgccccgccacccgcagagcgggcccagagggaccatgaccttgggctcccccaggaaaggccttctgatgctgctgatggccttggtgacccagggagaccctgtgaagccgtctcggggcccgctggtgacctgcacgtgtgagagcccacattgcaaggggcctacctgccggggggcctggtgcacagtagtgctggtgcgggaggaggggaggcacccccaggaacatcggggctgcgggaacttgcacagggagctctgcagggggcgccccaccgagttcgtcaaccactactgctgcgacagccacctctgcaaccacaacgtgtccctggtgctggaggccacccaacctccttcggagcagccgggaacagatggccagctggccctgatcctgggccccgtgctggccttgctggccctggtggccctgggtgtcctgggcctgtggcatgtccgacggaggcaggagaagcagcgtggcctgcacagcgagctgggagagtccagtctcatcctgaaagcatctgagcagggcgacacgatgttgggggacctcctggacagtgactgcaccacagggagtggctcagggctccccttcctggtgcagaggacagtggcacggcaggttgccttggtggagtgtgtgggaaaaggccgctatggcgaagtgtggcggggcttgtggcacggtgagagtgtggccgtcaagatcttctcctcgagggatgaacagtcctggttccgggagactgagatctataacacagtattgctcagacacgacaacatcctaggcttcatcgcctcagacatgacctcccgcaactcgagcacgcagctgtggctcatcacgcactaccacgagcacggctccctctacgactttctgcagagacagacgctggagccccatctggctctgaggctagctgtgtccgcggcatgcggcctggcgcacctgcacgtggagatcttcggtacacagggcaaaccagccattgcccaccgcgacttcaagagccgcaatgtgctggtcaagagcaacctgcagtgttgcatcgccgacctgggcctggctgtgatgcactcacagggcagcgattacctggacatcggcaacaacccgagagtgggcaccaagcggtacatggcacccgaggtgctggacgagcagatccgcacggactgctttgagtcctacaagtggactgacatctgggcctttggcctggtgctgtgggagattgcccgccggaccatcgtgaatggcatcgtggaggactatagaccacccttctatgatgtggtgcccaatgaccccagctttgaggacatgaagaaggtggtgtgtgtggatcagcagacccccaccatccctaaccggctggctgcagacccggtcctctcaggcctagctcagatgatgcgggagtgctggtacccaaacccctctgcccgactcaccgcgctgcggatcaagaagacactacaaaaaattagcaacagtccagagaagcctaaagtgattcaatagcccaggagcacctgattcctttctgcctgcagggggctgggggggtggggggcagtggatggtgccctatctgggtagaggtagtgtgagtgtggtgtgtgctggggatgggcagctgcgcctgcctgctcggcccccagcccacccagccaaaaatacagctgggctgaaacctgatcccctgctgtctggcctgctcaaagcggcaggctccctgacgcctggctctctccccacccctatggccagcatggtgcaccccctaccactcccgggacaggatgcaaaagaggctccagagtcagagtgccaagccagggaatcccagtcccagactcagagcccgggcctgcactttgccccctgcccttgatcaaccccactgccccaccagagctgccagggtggcacagggccctgtccagcccctggcacacacttccctgccaggcctcagcctctagcataagctccagagagccagggcccatcagtttctctctgtggatttgtatctcagctccatgatgccttgggctttctgtctcctcaacaagagtgcagcttgctgaatgtcagctgcctgagagagctggggcctgacttactagggcattaaatcctaagaggtcctactgaggtgtggcaggatcacaggccagtggaaaaagggcaggtcagatgggcaaggcccaggactttcagattaactgagaggatatcgaggccaagcatggcagggggaaggtcagtgggtgtcaagagacccaggtctgaccccggatgtttgctccatgtgacaaaagcaggcctgtctcaggaccttttcttttcttttttccttctttttttttttgacacggagtttcgctcttgttgtccaggctagagtgcaatggcatgatcccagctcaccgcaacgtctacctcccaggttcaaatcattctcttgcctcagactcccgagtagctgggattacaggcacatgccaccatgcctggctaattttgtatatttagtagaaacagggtttcaccatgctggccatgctggttctcgaactcctgacctcaggtgttccacctacctcagcctcccaaagtgctggggttacaggtgtgagccatcgcgcctggccaggacctttgtttcttatctacatattggaagatttggtcctgatgtcctttgaggcttctttagctctagttctctgacacttcagcctatatcacagctaacttcytcagtctcatctattccttatgctccagcccctggcaatttgcctcaagatgggggtttgaaaataactttacctgactcaaggagtgtctggagcacctcctagtctaagtctgcaagctccagttcttgcctaaaaccatgccagtggccacccttgggctcagacagctctgggccttttgaccacaagccagcccctcgccctctctgtggcatagtcttctctgccccaggactgcagggcggcttcctccaaggcttccaaggctcaaaagaaatttggctccatccaagaaggctccagctcccctactggcccctggcttcaggcccacacccctgggccaggsccagagagtgtgtctcaggagaattcaatgggctctagagagacacacagaaagtttgggcatttgggaaattttcaaggrtgtatgtatggytcacgtatggwgcaggttgtcctggtccykgggtgcagggaagtgggctgcagggaagtggattggaggggagcttgaggaatataaggagcgggggtggagactcaggctatggacaaggacagccccaaggttgggaagacctggccttagtcgtcctcagcctagggcagggcagtgaagaaagctctccccgctcctgctgtaatgacccagagtagcctccccaggccggcatcttatgtgtgtcttccaccatcctcatggtggcacttttctaggcctgtctcccagcattgtgcaaggctcggaagagaaccaggaagtgaaactgggtgaaaacagaaagctcaatggatgggctaggttcccagatcattagggcagagtttgcacgtcctctggttcactgggaatccacccagcccacgaatcatctccctctttgaaggattttwatttctactgggttttggaacaaactcctgctgagaccccacagccagaaactgaaagcagcagctccccaaagcctggaaaatccctaagagaaggcctgggggamaggaaktggagtgacaggggacaggtagagagaagggggcccaatggccagggagtgaaggaggtggcgttgctgagagcagtctgcacatgcttctgtctgagtgcaggaaggtgttccagggtcgaaattacacttctcgtacctggagacgctgtttgtgggagcactgggctcatgcctggcacacaataggtctgcaataaaccatggttaaatcctgaaaaaaaaaaaaaaa

SEQ ID NO: 28 - DNA, 1592 bp, Homo sapiens
tatgtccaccaaagacacctcgttggtcatgttctatcacctcttcgtcaaattgacatcaggtcctaacaggtcactttcaagatacagaagaggcaaattttgttttgagacttggccattcctagggtcagcaaagtgtattcctggcagccagaccttcagtcacttatcaggaaatgcttgacctaaagacagacaattctttccccaaactttgctgtttcttttttgagtctttgttgaaagatttcttttaaaaggcgttcgtgtgagaagatcacagcaacaaatctggcttgttctgttttagacttactttcttaactcttgggcagaagaaaatgaatgagatttgaagacctttgataccttgggtagacaaagcttgccttgaaactagaaataagacgaaactagattttaaggggaaaaaatttgctagtggtaatataattggttttgtttcatttttttatgagtctgaggagttgacattaaacgttgggatgttgctttgttaatgaagtcatttcaatttttgcaactcttaacatctgcatgcttccataaacagtgggttggaacaaaagaaaatgtgactaagggatattccttaaattcttttttatgttatgagagagaatattggaatataaagaatgttactttatctggtaaaccatctcataggccagaagcactaacagtttgaatggttggcttaaaaaaaaacgggagtctttgaatttaagcttatgtaaaattactatgcaaatataggttattatttatttttacagtgaaaataaaacactattgaagtataaatggaaagaaaataaaagcaaagcctgtttaatatagagacattaatgttgatatcactgtacgaacagtcatagcttgctgctcactgccgttaaagggttgacatacaaacattgtggaagagatttcagtttgagggctagtgtctgaattatggactccttaccctactccaccacttaaaacattttagagacttttgtgaaattaacaggtcatataattaataattgttgttttatgtacatttattgaaaggccatattgaggctccattgattttttttcctgcatatttatcagtatcgaattagaaaattgaaccttcagtgttactagatggaaatctaccaaaaagtagcaaggtttacgaatggtgggatttattggtgattaaacatttttttcctgtattttataagtttcacattacatttacaatgagaaaaaaatgtaaatgtagaattaaagtcttgttaatatcgtaatttgcctattgctgtactaaaagaagcttctataaaatgtatcattctcatccttagattcaggccagaaagtaactttcagtgttaggtatttgaaataatgcagcctgtcatatgtactctggttaccagaatgaaaaaacaaaaagagatacatacatagtaaggaaacatgaaattggaggaattgatccccatgtgtattgcagcttcatataccagtagtctctaataagtcattgctttaataaaaaaaaaaatagaaaatttaaa

SEQ ID NO: 29 - DNA, 1234 bp, Homo sapiens
tatttttgtacgtaaaatgattctattatgactgcctttgcatgtagtaatatgacaaagtgatccttcattatcacggtacactattgtttacttttcatctgtaaatgttttattgttacttttttaaaatgaatttttttaaaacaatctagccatcatcaaggtgctataagagttgtataaaagatatttttggcatttctaggcaagtatcagccaataagtatgttagtgatatcacagattgtaccaactattaactatgttaaataagtattcagtttcatgtgatctctgggaaaaaaatatgctgccttggtgctaatattgtatgtatttaaatgatcatctgactcagaaatataaacacttttaatgaaagggaggaacggaaggacaatttccagtgcacagaatcacttggatgaaataagaccagctctttacccttatttttggatatgccttttttggaagagacttagactttatccttattgttgttagtgttgttaatattcgttgcttcagcccacggtgccttggtctctccacaatcaaatggaggatcccccaagcagcttcattacagagtgatattgggaaagtgagatcctctcaccattttgccaagatactctaaaatgacatccaagtttaccagtagaaagacacaggatgcacagaatgggcatgaccttcagctcacgagcacacctggagaaattcagaaccaggttctgaatcatcacgattgccttttgcatgaaaacatcggctggtgatgtgacttctcttcaggccatgagcctaacaycctgccggttttcatgcccgctgcagtaatggacgtttgtgtgaagaaatgaactgtggagtacaaaatgctttgagtctttccgattgctcattaattcacttttttgttacttctttccaaaatggaagtgctgaagccatggtctttctgcccctccaagctgatgaagggaagcctttgccaatggcccatggaagacacttggtttgagaaaccctgcccacttccaaagaccaaagagattaggaaaagcctggcagtattctccaactccaaacaagctctagagtgctccaggaaaagttatattcagtatatgaataagtgttattctccattattaatgtgttctgaaaatatattatgaataaatacatcaccacacccaaaaaaaaaaaaaaaaaaaaaaaa

SEQ ID NO: 30 - DNA, 165 bp, Homo sapiens
atggaatggaatggaatggcatggaatcgtataaagtggaatggaatcaactcgagtggaatggaatggaatggaatggaatggaatgcagtacaatgcaatagaatggaatggaatgaactcgagttgactggaatggaatggaatggaatgcatttgaattga

SEQ ID NO: 31 - DNA, 1041 bp, Homo sapiens
ctaaagatctccctccaggcagcccttggctggtccctgcgagcccgtggagactgccagagatgtcctctttcggttacaggaccctgactgtggccctcttcaccctgatctgctgtccaggatcggatgagaaggtattcgaggtacacgtgaggccaaagaagctggcggttgagcccaaagggtccctcgaggtcaactgcagcaccacctgtaaccagcctgaagtgggtggtctggagacctctctaaataagattctgctggacgaacaggctcagtggaaacattacttggtctcaaacatctcccatgacacggtcctccaatgccacttcacctgctccgggaagcaggagtcaatgaattccaacgtcagcgtgtaccagcctccaaggcaggtcatcctgacactgcaacccactttggtggctgtgggcaagtccttcaccattgagtgcagggtgcccaccgtggagcccctggacagcctcaccctcttcctgttccgtggcaatgagactctgcactatgagaccttcgggaaggcagcccctgctccgcaggaggccacagccacattcaacagcacggctgacagagaggatggccaccgcaacttctcctgcctggctgtgctggacttgatgtctcgcggtggcaacatctttcacaaacactcagccccgaagatgttggagatctatgagcctgtgtcggacagccagatggtcatcatagtcacggtggtgtcggtgttgctgtccctgttcgtgacatctgtcctgctctgcttcatcttcggccagcacttgcgccagcagcggatgggcacctacggggtgcgagcggcttggaggaggctgccccaggccttccggccatagcaaccatgagtggcatggccaccaccacggtggtcactggaactcagtgtgactcctcagggttgaggtccagccctggctgaaggactgtgacaggcagcagagacttgggacattgccttttctagcccgaatacaaacacctggactt

SEQ ID NO: 32 - DNA, 4000 bp, Homo sapiens
gcacgatctgttcctcctgggaagatgcagaggctcatgatgctcctcgccacatcgggcgcctgcctgggcctgctggcagtggcagcagtggcagcagcaggtgctaaccctgcccaacgggacacccacagcctgctgcccacccaccggcgccaaaagagagattggatttggaaccagatgcacattgatgaagagaaaaacacctcacttccccatcatgtaggcaagatcaagtcaagcgtgagtcgcaagaatgccaagtacctgctcaaaggagaatatgtgggcaaggtcttccgggtcgatgcagagacaggagacgtgttcgccattgagaggctggaccgggagaatatctcagagtaccacctcactgctgtcattgtggacaaggacactggtgaaaacctggagactccttccagcttcaccatcaaagttcatgacgtgaacgacaactggcctgtgttcacgcatcggttgttcaatgcgtccgtgcctgagtcgtcggctgtggggacctcagtcatctctgtgacagcagtggatgcagacgaccccactgtgggagaccacgcctctgtcatgtaccaaatcctgaaggggaaagagtattttgccatcgataattctggacgtattatcacaataacgaaaagcttggaccgagagaagcaggccaggtatgagatcgtggtggaagcgcgagatgcccagggcctccggggggactcgggcacggccaccgtgctggtcactctgcaagacatcaatgacaacttccccttcttcacccagaccaagtacacatttgtcgtgcctgaagacacccgtgtgggcacctctgtgggctctctgtttgttgaggacccagatgagccccagaaccggatgaccaagtacagcatcttgcggggcgactaccaggacgctttcaccattgagacaaaccccgcccacaacgagggcatcatcaagcccatgaagcctctggattatgaatacatccagcaatacagcttcatcgtcgaggccacagaccccaccatcgacctccgatacatgagccctcccgcgggaaacagagcccaggtcattatcaacatcacagatgtggacgagccccccattttccagcagcctttctaccacttccagctgaaggaaaaccagaagaagcctctgattggcacagtgctggccatggaccctgatgcggctaggcatagcattggatactccatccgcaggaccagtgacaagggccagttcttccgagtcacaaaaaagggggacatttacaatgagaaagaactggacagagaagtctacccctggtataacctgactgtggaggccaaagaactggattccactggaacccccacaggaaaagaatccattgtgcaagtccacattgaagttttggatgagaatgacaatgccccggagtttgccaagccctaccagcccaaagtgtgtgagaacgctgtccatggccagctggtcctgcagatctccgcaatagacaaggacataacaccacgaaacgtgaagttcaaattcaccttgaatactgagaacaactttaccctcacggataatcacgataacacggccaacatcacagtcaagtatgggcagtttgaccgggagcataccaaggtccacttcctacccgtggtcatctcagacaatgggatgccaagtcgcacgggcaccagcacgctgaccgtggccgtgtgcaagtgcaacgagcagggcgagttcaccttctgcgaggatatggccgcccaggtgggcgtgagcatccaggcagtggtagccatcttactctgcatcctcaccatcacagtgatcaccctgctcatcttcctgcggcggcggctccggaagcaggcccgcgcgcacggcaagagcgtgccggagatccacgagcagctggtcacctacgacgaggagggcggcggcgagatggacaccaccagctacgatgtgtcggtgctcaactcggtgcgccgcggcggggccaagcccccgcggcccgcgctggacgcccggccttccctctatgcgcaggtgcagaagccaccgaggcacgcgcctggggcacacggagggcccggggagatggcagccatgatcgaggtgaagaaggacgaggcggaccacgacggcgacggccccccctacgacacgctgcacatctacggctacgagggctccgagtccatagccgagtccctcagctccctgggcaccgactcatccgactctgacgtggattacgacttccttaacgactggggacccaggtttaagatgctggctgagctgtacggctcggacccccgggaggagctgctgtattaggcggccgaggtcactctgggcctggggacccaaaccccctgcagcccaggccagtcagactccaggcaccacagcctccaaaaatggcagtgactccccagcccagcaccccttcctcgtgggtcccagagacctcatcagccttgggatagcaaactccaggttcctgaaatatccaggaatatatgtcagtgatgactattctcaaatgctggcaaatccaggctggtgttctgtctgggctcagacatccacataaccctgtcacccacagaccgccgtctaactcaaagacttcctctggctccccaaggctgcaaagcaaaacagactgtgtttaactgctgcagggtctttttctagggtccctgaacgccctggtaaggctggtgaggtcctggtgcctatctgcctggaggcaaaggcctggacagcttgacttgtggggcaggattctctgcagcccattcccaagggagactgaccatcatgccctctctcgggagccctagccctgctccaactccatactccactccaagtgccccaccactccccaacccctctccaggcctgtcaagagggaggaaggggccccatggcagctcctgaccttgggtcctgaagtgacctcactggcctgccatgccagtaactgtgctgtactgagcactgaaccacattcagggaaatgcttattaaaccttgaagcaactgtgaattcattctggaggggcagtggagatcaggagtgacagatcacagggtgagggccacctccacacccaccccctctggagaaggcctggaagagctgagaccttgctttgagactcctcagcacccctccagttttgcctgagaaggggcagatgttcccggagatcagaagacgtctccccttctctgcctcacctggtcgccaatccatgctctctttcttttctctgtctactccttatcccttggtttagaggaacccaagatgtggcctttagcaaaactgacaatgtccaaacccactcatgactgcatgacggagccgagcatgtgtctttacacctcgctgttgtcacatctcagggaactgaccctcaggcacaccttgcagaaggaaggccctgccctgcccaacctctgtggtcacccatgcatcattccactggaacgtttcactgcaaacacaccttggagaagtggcatcagtcaacagagaggggcagggaaggagacaccaagctcacccttcgtcatggaccgaggttcccactctggcaaagcccctcacactgcaagggattgtagataacactgacttgtttgttttaaccaataactagcttcttataatgatttttttactaatgatacttacaagtttctagctctcacagacatatagaataagggtttttgcataataagcaggttgttatttaggttaacaatattaattcaggttttttagttggaaaaacaattcctgtaaccttctattttctataattgtagtaattgctctacagataatgtctatatattggccaaactggtgcatgacaagtactgtatttttttatacctaaataaagaaaaatctttagcctgggcaacaaaaaaa

SEQ ID NO: 33 - DNA, 3432 bp, Homo sapiens
actccagcgcgcggctacctacgcttggtgcttgctttctccagccatcggagaccagagccgccccctctgctcgagaaaggggctcagcggcggcggaagcggagggggaccaccgtggagagcgcggtcccagcccggccactgcggatccctgaaaccaaaaagctcctgctgcttctgtaccccgcctgtccctcccagctgcgcagggccccttcgtgggatcatcagcccgaagacagggatggagaggcctctgtgctcccacctctgcagctgcctggctatgctggccctcctgtcccccctgagcctggcacagtatgacagctggccccattaccccgagtacttccagcaaccggctcctgagtatcaccagccccaggcccccgccaacgtggccaagattcagctgcgcctggctgggcagaagaggaagcacagcgagggccgggtggaggtgtactatgatggccagtggggcaccgtgtgcgatgacgacttctccatccacgctgcccacgtcgtctgccgggagctgggctatgtggaggccaagtcctggactgccagctcctcctacggcaagggagaagggcccatctggttagacaatctccactgtactggcaacgaggcgacccttgcagcatgcacctccaatggctggggcgtcactgactgcaagcacacggaggatgtcggtgtggtgtgcagcgacaaaaggattcctgggttcaaatttgacaattcgttgatcaaccagatagagaacctgaatatccaggtggaggacattcggattcgagccatcctctcaacctaccgcaagcgcaccccagtgatggagggctacgtggaggtgaaggagggcaagacctggaagcagatctgtgacaagcactggacggccaagaattcccgcgtggtctgcggcatgtttggcttccctggggagaggacatacaataccaaagtgtacaaaatgtttgcctcacggaggaagcagcgctactggccattctccatggactgcaccggcacagaggcccacatctccagctgcaagctgggcccccaggtgtcactggaccccatgaagaatgtcacctgcgagaatgggctgccggccgtggtgagttgtgtgcctgggcaggtcttcagccctgacggaccctcgagattccggaaagcatacaagccagagcaacccctggtgcgactgagaggcggtgcctacatcggggagggccgcgtggaggtgctcaaaaatggagaatgggggaccgtctgcgacgacaagtgggacctggtgtcggccagtgtggtctgcagagagctgggctttgggagtgccaaagaggcagtcactggctcccgactggggcaagggatcggacccatccacctcaacgagatccagtgcacaggcaatgagaagtccattatagactgcaagttcaatgccgagtctcagggctgcaaccacgaggaggatgctggtgtgagatgcaacacccctgccatgggcttgcagaagaagctgcgcctgaacggcggccgcaatccctacgagggccgagtggaggtgctggtggagagaaacgggtcccttgtgtgggggatggtgtgtggccaaaactggggcatcgtggaggccatggtggtctgccgccagctgggcctgggattcgccagcaacgccttccaggagacctggtattggcacggagatgtcaacagcaacaaagtggtcatgagtggagtgaagtgctcgggaacggagctgtccctggcgcactgccgccacgacggggaggacgtggcctgcccccagggcggagtgcagtacggggccggagttgcctgctcagaaaccgcccctgacctggtcctcaatgcggagatggtgcagcagaccacctacctggaggaccggcccatgttcatgctgcagtgtgccatggaggagaactgcctctcggcctcagccgcgcagaccgaccccaccacgggctaccgccggctcctgcgcttctcctcccagatccacaacaatggccagtccgacttccggcccaagaacggccgccacgcgtggatctggcacgactgtcacaggcactaccacagcatggaggtgttcacccactatgacctgctgaacctcaatggcaccaaggtggcagagggccacaaggccagcttctgcttggaggacacagaatgtgaaggagacatccagaagaattacgagtgtgccaacttcggcgatcagggcatcaccatgggctgctgggacatgtaccgccatgacatcgactgccagtgggttgacatcactgacgtgccccctggagactacctgttccaggttgttattaaccccaacttcgaggttgcagaatccgattactccaacaacatcatgaaatgcaggagccgctatgacggccaccgcatctggatgtacaactgccacataggtggttccttcagcgaagagacggaaaaaaagtttgagcacttcagcgggctcttaaacaaccagctgtccccgcagtaaagaagcctgcgtggtcaactcctgtcttcaggccacaccacatcttccatgggacttccccccaacaactgagtctgaacgaatgccacgtgccctcacccagcccggcccccaccctgtccagacccctacagctgtgtctaagctcaggaggaaagggaccctcccatcattcatggggggctgctacctgacccttggggcctgagaaggccttgggggggtggggtttgtccacagagctgctggagcagcaccaagagccagtcttgaccgggatgaggcccacagacaggttgtcatcagcttgtcccattcaagccaccgagctcaccacagacacagtggagccgcgctcttctccagtgacacgtggacaaatgcgggctcatcagcccccccagagagggtcaggccgaaccccatttctcctcctcttaggtcattttcagcaaacttgaatatctagacctctcttccaatgaaaccctccagtctattatagtcacatagataatggtgccacgtgttttctgatttggtgagctcagacttggtgcttccctctccacaacccccaccccttgtttttcaagatactattattatattttcacagacttttgaagcacaaatttattggcatttaatattggacatctgggcccttggaagtacaaatctaaggaaaaaccaacccactgtgtaagtgactcatcttcctgttgttccaattctgtgggtttttgattcaacggtgctataaccagggtcctgggtgacagggcgctcactgagcaccatgtgtcatcacagacacttacacatacttgaaacttggaataaaagaaagatttatg

SEQ ID NO: 34 - DNA, 3845 bp, Homo sapiens
cgctcgtcctggctggcctgggtcggcctctggagtatggtctggcgggtgccccctttcttgctccccatcctcttcttggcttctcatgtgggcgcggcggtggacctgacgctgctggccaacctgcggctcacggacccccagcgcttcttcctgacttgcgtgtctggggaggccggggcggggaggggctcggacgcctggggcccgcccctgctgctggagaaggacgaccgtatcgtgcgcaccccgcccgggccacccctgcgcctggcgcgcaacggttcgcaccaggtcacgcttcgcggcttctccaagccctcggacctcgtgggcgtcttctcctgcgtgggcggtgctggggcgcggcgcacgcgcgtcatctacgtgcacaacagccctggagcccacctgcttccagacaaggtcacacacactgtgaacaaaggtgacaccgctgtactttctgcacgtgtgcacaaggagaagcagacagacgtgatctggaagagcaacggatcctacttctacaccctggactggcatgaagcccaggatgggcggttcctgctgcagctcccaaatgtgcagccaccatcgagcggcatctacagtgccacttacctggaagccagccccctgggcagcgccttctttcggctcatcgtgcggggttgtggggctgggcgctgggggccaggctgtaccaaggagtgcccaggttgcctacatggaggtgtctgccacgaccatgacggcgaatgtgtatgcccccctggcttcactggcacccgctgtgaacaggcctgcagagagggccgttttgggcagagctgccaggagcagtgcccaggcatatcaggctgccggggcctcaccttctgcctcccagacccctatggctgctcttgtggatctggctggagaggaagccagtgccaagaagcttgtgcccctggtcattttggggctgattgccgactccagtgccagtgtcagaatggtggcacttgtgaccggttcagtggttgtgtctgcccctctgggtggcatggagtgcactgtgagaagtcagaccggatcccccagatcctcaacatggcctcagaactggagttcaacttagagacgatgccccggatcaactgtgcagctgcagggaaccccttccccgtgcggggcagcatagagctacgcaagccagacggcactgtgctcctgtccaccaaggccattgtggagccagagaagaccacagctgagttcgaggtgccccgcttggttcttgcggacagtgggttctgggagtgccgtgtgtccacatctggcggccaagacagccggcgcttcaaggtcaatgtgaaagtgccccccgtgcccctggctgcacctcggctcctgaccaagcagagccgccagcttgtggtctccccgctggtctcgttctctggggatggacccatctccactgtccgcctgcactaccggccccaggacagtaccatggactggtcgaccattgtggtggaccccagtgagaacgtgacgttaatgaacctgaggccaaagacaggatacagtgttcgtgtgcagctgagccggccaggggaaggaggagagggggcctgggggcctcccaccctcatgaccacagactgtcctgagcctttgttgcagccgtggttggagggctggcatgtggaaggcactgaccggctgcgagtgagctggtccttgcccttggtgcccgggccactggtgggcgacggtttcctgctgcgcctgtgggacgggacacgggggcaggagcggcgggagaacgtctcatccccccaggcccgcactgccctcctgacgggactcacgcctggcacccactaccagctggatgtgcagctctaccactgcaccctcctgggcccggcctcgccccctgcacacgtgcttctgccccccagtgggcctccagccccccgacacctccacgcccaggccctctcagactccgagatccagctgacatggaagcacccggaggctctgcctgggccaatatccaagtacgttgtggaggtgcaggtggctgggggtgcaggagacccactgtggatagacgtggacaggcctgaggagacaagcaccatcatccgtggcctcaacgccagcacgcgctacctcttccgcatgcgggccagcattcaggggctcggggactggagcaacacagtagaagagtccaccctgggcaacgggctgcaggctgagggcccagtccaagagagccgggcagctgaagagggcctggatcagcagctgatcctggcggtggtgggctccgtgtctgccacctgcctcaccatcctggccgcccttttaaccctggtgtgcatccgcagaagctgcctgcatcggagacgcaccttcacctaccagtcaggctcgggcgaggagaccatcctgcagttcagctcagggaccttgacacttacccggcggccaaaactgcagcccgagcccctgagctacccagtgctagagtgggaggacatcacctttgaggacctcatcggggaggggaacttcggccaggtcatccgggccatgatcaagaaggacgggctgaagatgaacgcagccatcaaaatgctgaaagagtatgcctctgaaaatgaccatcgtgactttgcgggagaactggaagttctgtgcaaattggggcatcaccccaacatcatcaacctcctgggggcctgtaagaaccgaggttacttgtatatcgctattgaatatgccccctacgggaacctgctagattttctgcggaaaagccgggtcctagagactgacccagcttttgctcgagagcatgggacagcctctacccttagctcccggcagctgctgcgtttcgccagtgatgcggccaatggcatgcagtacctgagtgagaagcagttcatccacagggacctggctgcccggaatgtgctggtcggagagaacctagcctccaagattgcagacttcggcctttctcggggagaggaggtttatgtgaagaagacgatggggcgtctccctgtgcgctggatggccattgagtccctgaactacagtgtctataccaccaagagtgatgtctggtcctttggagtccttctttgggagatagtgagccttggaggtacaccctactgtggcatgacctgtgccgagctctatgaaaagctgccccagggctaccgcatggagcagcctcgaaactgtgacgatgaagtgtacgagctgatgcgtcagtgctggcgggaccgtccctatgagcgacccccctttgcccagattgcgctacagctaggccgcatgctggaagccaggaaggcctatgtgaacatgtcgctgtttgagaacttcacttacgcgggcattgatgccacagctgaggaggcctgagctgccatccagccagaacgtggctctgctggccggagcaaactctgctgtctaacctgtgaccagtctgacccttacagcctctgacttaagctgcctcaaggaatttttttaacttaagggagaaaaaaagggatctggggatggggtgggcttaggggaactgggttcccatgctttgtaggtgtctcatagctatcctgggcatccttctttctagttcagctgccccacaggtgtgtttcccatcccactgctcccccaacacaaacccccactccagctccttcgcttaagccagcactcacaccactaacatgccctgttcagctactcccactcccggcctgtcattcagaaaaaaataaatgttctaataagctccaaaaaaa

SEQ ID NO: 35 - DNA, 1645 bp, Homo sapiens
gggattcgggccgcccagctacgggaggacctggagtggcactgggcgcccgacggaccatccccgggacccgcctgcccctcggcgccccgccccgccgggccgctccccgtcgggttccccagccacagccttacctacgggctcctgactccgcaaggcttccagaagatgctcgaaccaccggccggggcctcggggcagcagtgagggaggcgtccagccccccactcagctcttctcctcctgtgccaggggctccccgggggatgagcatggtggttttccctcggagccccctggctcgggacgtctgagaagatgccggtcatgaggctgttcccttgcttcctgcagctcctggccgggctggcgctgcctgctgtgcccccccagcagtgggccttgtctgctgggaacggctcgtcagaggtggaagtggtacccttccaggaagtgtggggccgcagctactgccgggcgctggagaggctggtggacgtcgtgtccgagtaccccagcgaggtggagcacatgttcagcccatcctgtgtctccctgctgcgctgcaccggctgctgcggcgatgagaatctgcactgtgtgccggtggagacggccaatgtcaccatgcagctcctaaagatccgttctggggaccggccctcctacgtggagctgacgttctctcagcacgttcgctgcgaatgccggcctctgcgggagaagatgaagccggaaaggtgcggcgatgctgttccccggaggtaacccaccccttggaggagagagaccccgcacccggctcgtgtatttattaccgtcacactcttcagtgactcctgctggtacctgccctctatttattagccaactgtttccctgctgaatgcctcgctcccttcaagacgaggggcagggaaggacaggaccctcaggaattcagtgccttcaacaacgtgagagaaagagagaagccagccacagacccctgggagcttccgctttgaaagaagcaagacacgtggcctcgtgaggggcaagctaggccccagaggccctggaggtctccaggggcctgcagaaggaaagaagggggccctgctacctgttcttgggcctcaggctctgcacagacaagcagcccttgctttcggagctcctgtccaaagtagggatgcggattctgctggggccgccacggcctggtggtgggaaggccggcagcgggcggaggggattcagccacttccccctcttcttctgaagatcagaacattcagctctggagaacagtggttgcctgggggcttttgccactccttgtcccccgtgatctcccctcacactttgccatttgcttgtactgggacattgttctttccggccgaggtgccaccaccctgcccccactaagagacacatacagagtgggccccgggctggagaaagagctgcctggatgagaaacagctcagccagtggggatgaggtcaccaggggaggagcctgtgcgtcccagctgaaggcagtggcaggggagcaggttccccaagggccctggcacccccacaagctgtccctgcagggccatctgactgccaagccagattctcttgaataaagtattctagtgtggaaacgc

SEQ ID NO: 36 - DNA, 4829 bp, Homo sapiens
atggagggggaccgggtggccgggcggccggtgctgtcgtcgttaccagtgctactgctgctgcagttgctaatgttgcgggccgcggcgctgcacccagacgagctcttcccacacggggagtcgtggtgggaccagctcctgcaggaaggcgacgacgtaaagctcagccgtggtgaagctggcgaatcccctgcacttcttacgaagcccgattcagcaacctctacgtgggcaccaacggcatcatctccactcaggacttccccagggaaacgcagtatgtggactatgatttccccaccgacttcccggccatcgccccttttctggcggacatcgacacgagccacggcagaggccgagtcctgtaccgagaggacacctcccccgcagtgctgggcctggccgcccgctatgtgcgcgctggcttcccgcgctctgcgcgctttttacccccacccacgccttcctggccacctgggagcaggtaggcgcttacgaggaggtcaaacgcgggcgctgccctcgggagagctgaacactttccaggcagttttggcatctgatgggtctgatagctacgccctctttctttatcctgccaacggcctgcagttccttggaacccgccccaaagagtcttacaatgtccagcttcagcttccagctcgggtgggcttctgccgaggggaggctgatgatctgaagtcagaaggaccatatttcagcttgactagcactgaacagtctgtgaaaaatctctatcaactaagcaacctggggatccctggagtgtgggctttccatatcggcagcacttccccgttggacaatgtcaggccagctgcagttggagacctttccgctgcccactcttctgttcccctgggacgttccttcagccatgctacagccctggaaagtgactataatgaggacaatttggattactacgatgtgaatgaggaggaagctgaataccttccgggtgaaccagaggaggcattgaatggccacagcagcattgatgtttccttccaatccaaagtggatacaaagcctttagaggaatcttccaccttggatcctcacaccaaagaaggaacatctctgggagaggtagggggcccagatttaaaaggccaagttgagccctgggatgagagagagaccagaagcccagctccaccagaggtagacagagattcactggctccttcctgggaaaccccaccaccgtaccccgaaaacggaagcatccagccctacccagatggagggccagtgccttcggaaatggatgttcccccagctcatcctgaagaagaaattgttcttcgaagttaccctgcttcaggtcacactacacccttaagtcgagggacgtatgaggtgggactggaagacaacataggttccaacaccgaggtcttcacgtataatgctgccaacaaggaaacctgtgaacacaaccacagacaatgctcccggcatgccttctgcacggactatgccactggcttctgctgccactgccaatccaagttttatggaaatgggaagcactgtctgcctgagggggcacctcaccgagtgaatgggaaagtgagtggccacctccacgtgggccatacacccgtgcacttcactgatgtggacctgcatgcgtatatcgtgggcaatgatggcagagcctacacggccatcagccacatcccacagccagcagcccaggccctcctccccctcacaccaattggaggcctgtttggctggctctttgctttagaaaaacctggctctgagaacggcttcagcctcgcaggtgctgcctttacccatgacatggaagttacattctacccgggagaggagacggttcgtatcactcaaactgctgagggacttgacccagagaactacctgagcattaagaccaacattcaaggccaggtgccttacgtcccagcaaatttcacagcccacatctctccctacaaggagctgtaccactactccgactccactgtgacctctacaagttccagagactactctctgacttttggtgcaatcaaccaaacatggtcctaccgcatccaccagaacatcacttaccaggtgtgcaggcacgcccccagacacccgtccttccccaccacccagcagctgaacgtggaccgggtctttgccttgtataatgatgaagaaagagtgcttagatttgctgtgaccaatcaaattggcccggtcaaagaagattcagaccccactccggtgaatccttgctatgatgggagccacatgtgtgacacaacagcacggtgccatccagggacaggtgtagattacacctgtgagtgcgcatctgggtaccagggagatggacggaactgtgtggatgaaaatgaatgtgcaactggctttcatcgctgtggccccaactctgtatgtatcaacttgcctggaagctacaggtgtgagtgccggagtggttatgagtttgcagatgaccggcatacttgcatcttgatcaccccacctgccaacccctgtgaggatggcagtcatacctgtgctcctgctgggcaggcccggtgtgttcaccatggaggcagcacgttcagctgtgcctgcctgcctggttatgccggcgatgggcaccagtgcactgatgtagatgaatgctcagaaaacagatgtcaccctgcagctacctgctacaatactcctggttccttctcctgccgttgtcaacccggatattatggggatggatttcagtgcatacctgactccacctcaagcctgacaccctgtgaacaacagcagcgccatgcccaggcccagtatgcctaccctggggcccggttccacatcccccaatgcgacgagcagggcaacttcctgcccctacagtgtcatggcagcactggtttctgctggtgcgtggaccctgatggtcatgaagttcctggtacccagactccacctggctccaccccgcctcactgtggaccatcaccagagcccacccagaggcccccgaccatctgtgagcgctggagggaaaacctgctggagcactacggtggcaccccccgagatgaccagtacgtgccccagtgcgatgacctgggccacttcatccccctgcagtgccacggaaagagcgacttctgctggtgtgtggacaaagatggcagagaggtgcagggcacccgctcccagccaggcaccacccctgcgtgtatacccaccgtcgctccacccatggtccggcccacgccccggccagatgtgacccctccatctgtgggcaccttcctgctctatactcagggccagcagattggctacttacccctcaatggcaccaggcttcagaaggatgcagctaagaccctgctgtctctgcatggctccataatcgtgggaattgattacgactgccgggagaggatggtgtactggacagatgttgctggacggacaatcagccgtgccggtctggaactgggagcagagcctgagacgatcgtgaattcaggtctgataagccctgaaggacttgccatagaccacatccgcagaacaatgtactggacggacagtgtcctggataagatagagagcgccctgctggatggctctgagcgcaaggtcctcttctacacagatctggtgaatccccgtgccatcgctgtggatccaatccgaggcaacttgtactggacagactggaatagagaagctcctaaaattgaaacgtcatctttagatggagaaaacagaagaattctgatcaatacagacattggattgcccaatggcttaacctttgaccctttctctaaactgctctgctgggcagatgcaggaaccaaaaaactggagtgtacactacctgatggaactggacggcgtgtcattcaaaacaacctcaagtaccccttcagcatcgtaagctatgcagatcacttctaccacacagactggaggagggatggtgttgtatcagtaaataaacatagtggccagtttactgatgagtatctcccagaacaacgatctcacctctacgggataactgcagtctacccctactgcccaacaggaagaaagtaagtacagtaatgtaaaggaagacttggagtttacaatcagaacctggaccctaaagaacagtgactgcaaaggcaaagaaagtaaaaaaggaattggccattagacgttcctgagcatccaagatgaacattttgtagtgcaaaaagacttttgtgaaaagctgatacctcaatctttactactgtatttttaaaaatgaaggttgttattgcaagtttaaaaaggtaacagaattttaactgttgcttattaaagcaacttcttgtaaacatttatcattaatatttaaaagatcaaattcattcaactaagaattagagtttaagactctaaacctgatttttgccatggattccttctggccaagaaattaaagcacatgtgatcaatataacaatataatcctaaaccttgacagttggagaagccaatgcagaactgatgggaaaggaccaattatttatagtttcccaacaaaagttctaagattttttacctctgcatcagtgcatttctatttatatcaaaaggtgctaaaatgattcaatttgcattttctgatcctgtagtgcctctatagaagtacccacagaaagtaaagtatcacatttataaataccaaagatgtaacaattttaaaattttctagattactccaataaagtgttttaagtttaaaaaaaaaaaaaaaaaaaaaa

SEQ ID NO: 37 - DNA, 2767 bp, Homo sapiens
gcggagggtgcgtgcgggccgcggcagccgaacaaaggagcaggggcgccgccgcagggacccgccacccacctcccggggccgcgcagcggcctctcgtctactgccaccatgaccgccaacggcacagccgaggcggtgcagatccagttcggcctcatcaactgcggcaacaagtacctgacggccgaggcgttcgggttcaaggtgaacgcgtccgccagcagcctgaagaagaagcagatctggacgctggagcagccccctgacgaggcgggcagcgcggccgtgtgcctgcgcagccacctgggccgctacctggcggcggacaaggacggcaacgtgacctgcgagcgcgaggtgcccggtcccgactgccgtttcctcatcgtggcgcacgacgacggtcgctggtcgctgcagtccgaggcgcaccggcgctacttcggcggcaccgaggaccgcctgtcctgcttcgcgcagacggtgtcccccgccgagaagtggagcgtgcacatcgccatgcaccctcaggtcaacatctacagtgtcacccgtaagcgctacgcgcacctgagcgcgcggccggccgacgagatcgccgtggaccgcgacgtgccctggggcgtcgactcgctcatcaccctcgccttccaggaccagcgctacagcgtgcagaccgccgaccaccgcttcctgcgccacgacgggcgcctggtggcgcgccccgagccggccactggctacacgctggagttccgctccggcaaggtggccttccgcgactgcgagggccgttacctggcgccgtcggggcccagcggcacgctcaaggcgggcaaggccaccaaggtgggcaaggacgagctctttgctctggagcagagctgcgcccaggtcgtgctgcaggcggccaacgagaggaacgtgtccacgcgccagggtatggacctgtctgccaatcaggacgaggagaccgaccaggagaccttccagctggagatcgaccgcgacaccaaaaagtgtgccttccgtacccacacgggcaagtactggacgctgacggccaccgggggcgtgcagtccaccgcctccagcaagaatgccagctgctactttgacatcgagtggcgtgaccggcgcatcacactgagggcgtccaatggcaagtttgtgacctccaagaagaatgggcagctggccgcctcggtggagacagcaggggactcagagctcttcctcatgaagctcatcaaccgccccatcatcgtgttccgcggggagcatggcttcatcggctgccgcaaggtcacgggcaccctggacgccaaccgctccagctatgacgtcttccagctggagttcaacgatggcgcctacaacatcaaagactccacaggcaaatactggacggtgggcagtgactccgcggtcaccagcagcggcgacactcctgtggacttcttcttcgagttctgcgactataacaaggtggccatcaaggtgggcgggcgctacctgaagggcgaccacgcaggcgtcctgaaggcctcggcggaaaccgtggaccccgcctcgctctgggagtactagggccggcccgtccttccccgcccctgcccacatggcggctcctgccaaccctccctgctaaccccttctccgccaggtgggctccagggcgggaggcaagcccccttgcctttcaaactggaaaccccagagaaaacggtgcccccacctgtcgcccctatggactccccactctcccctccgcccgggttccctactcccctcgggtcagcggctgcggcctggccctgggagggatttcagatgcccctgccctcttgtctgccacggggcgagtctggcacctctttcttctgacctcagacggctctgagccttatttctctggaagcggctaagggacggttgggggctgggagccctgggcgtgtagtgtaactggaatcttttgcctctcccagccacctcctcccagccccccaggagagctgggcacatgtcccaagcctgtcagtggccctccctggtgcactgtccccgaaacccctgcttgggaagggaagctgtcgggagggctaggactgacccttgtggtgtttttttgggtggtggctggaaacagcccctctcccacgtgggagaggctcagcctggctcccttccctggagcggcagggcgtgacggccacagggtctgcccgctgcacgttctgccaaggtggtggtggcgggcgggtaggggtgtgggggccgtcttcctcctgtctctttcctttcaccctagcctgactggaagcagaaaatgaccaaatcagtattttttttaatgaaatattattgctggaggcgtcccaggcaagcctggctgtagtagcgagtgatctggcggggggcgtctcagcaccctccccagggggtgcatctcagccccctctttccgtccttcccgtccagccccagccctgggcctgggctgccgacacctgggccagagcccctgctgtgattggtgctccctgggcctcccgggtggatgaagccaggcgtcgccccctccgggagccctggggtgagccgccggggcccccctgctgccagcctcccccgtccccaacatgcatctcactctgggtgtcttggtcttttattttttgtaagtgtcatttgtataactctaaacgcccatgatagtagcttcaaactggaaatagcgaaataaaataactcagtctgc

SEQ ID NO: 38 - DNA, 1284 bp, Homo sapiens
caggtccggagcctcaacttcaggatgttgacaacattgctgccgatactgctgctgtctggctgggccttttgtagccaagacgcctcagatggcctccaaagacttcatatgctccagatctcctacttccgcgacccctatcacgtgtggtaccagggcaacgcgtcgctggggggacacctaacgcacgtgctggaaggcccagacaccaacaccacgatcattcagctgcagcccttgcaggagcccgagagctgggcgcgcacgcagagtggcctgcagtcctacctgctccagttccacggcctcgtgcgcctggtgcaccaggagcggaccttggcctttcctctgaccatccgctgcttcctgggctgtgagctgcctcccgagggctctagagcccatgtcttcttcgaagtggctgtgaatgggagctcctttgtgagtttccggccggagagagccttgtggcaggcagacacccaggtcacctccggagtggtcaccttcaccctgcagcagctcaatgcctacaaccgcactcggtatgaactgcgggaattcctggaggacacctgtgtgcagtatgtgcagaaacatatttccgcggaaaacacgaaagggagccaaacaagccgctcctacacttcgctggtcctgggcgtcctggtgggcggtttcatcattgctggtgtggctgtaggcatcttcctgtgcacaggtggacggcgatgttaattactctccagccccgtcagaaggggctggattgatggaggctggcaagggaaagtttcagctcactgtgaagccagactccccaactgaaacaccagaaggtttggagtgacagctcctttcttctcccacatctgcccactgaagatttgagggaggggagatggagaggagaggtggacaaagtacttggtttgctaagaacctaagaacgtgtatgctttgctgaattagtctgataagtgaatgtttatctatctttgtggaaaacagataatggagttggggcaggaagcctatgcgccatcctccaaagacagacagaatcacctgaggcgttcaaaagatataaccaaataaacaagtcatccacaatcaaaatacaacattcaatacttccaggtgtgtcagacttgggatgggacgctgatataatagggtagaaagaagtaacacgaagaagtggtggaaatgtaaaatccaagtcatatggcagtgatcaattattaatcaattaataatattaataaatttcttatattt

SEQ ID NO: 39 - DNA, 3583 bp, Homo sapiens; identical to SEQ ID NO: 7

SEQ ID NO: 40 - DNA, 1251 bp, Homo sapiens
ggagctgtttacccccactctaataggggttcaatataaaaagccggcagagagctgtccaagtcagacgcgcctctgcatctgcgccaggcgaacgggtcctgcgcctcctgcagtcccagctctccaccaccgccgcgtgcgcctgcagacgctccgctcgctgccttctctcctggcaggcgctgccttttctccccgttaaagggcacttgggctgaaggatcgctttgagatctgaggaacccgcagcgctttgagggacctgaagctgtttttcttcgttttcctttgggttcagtttgaacgggaggtttttgatccctttttttcagaatggattatttgctcatgattttctctctgctgtttgtggcttgccaaggagctccagaaacagcagtcttaggcgctgagctcagcgcggtgggtgagaacggcggggagaaacccactcccagtccaccctggcggctccgccggtccaagcgctgctcctgctcgtccctgatggataaagagtgtgtctacttctgccacctggacatcatttgggtcaacactcccgagcacgttgttccgtatggacttggaagccctaggtccaagagagccttggagaatttacttcccacaaaggcaacagaccgtgagaatagatgccaatgtgctagccaaaaagacaagaagtgctggaatttttgccaagcaggaaaagaactcagggctgaagacattatggagaaagactggaataatcataagaaaggaaaagactgttccaagcttgggaaaaagtgtatttatcagcagttagtgagaggaagaaaaatcagaagaagttcagaggaacacctaagacaaaccaggtcggagaccatgagaaacagcgtcaaatcatcttttcatgatcccaagctgaaaggcaagccctccagagagcgttatgtgacccacaaccgagcacattggtgacagacttcggggcctgtctgaagccatagcctccacggagagccctgtggccgactctgcactctccaccctggctgggatcagagcaggagcatcctctgctggttcctgactggcaaaggaccagcgtcctcgttcaaaacattccaagaaaggttaaggagttcccccaaccatcttcactggcttccatcagtggtaactgctttggtctcttctttcatctggggatgacaatggacctctcagcagaaacacacagtcacattcgaattc

SEQ ID NO: 41 - DNA, 2456 bp, Homo sapiens
gcaagcacggaacaagctgagacggatgataatatggatacaaaatctattctagaagaacttcttctcaaaagatcacagcaaaagaagaaaatgtcaccaaataattacaaagaacggctttttgttttgaccaaaacaaacctttcctactatgaatatgacaaaatgaaaaggggcagcagaaaaggatccattgaaattaagaaaatcagatgtgtggagaaagtaaatctcgaggagcagacgcctgtagagagacagtacccatttcagattgtctataaagatgggcttctctatgtctatgcatcaaatgaagagagccgaagtcagtggttgaaagcattacaaaaagagataaggggtaacccccacctgctggtcaagtaccatagtgggttcttcgtggacgggaagttcctgtgttgccagcagagctgtaaagcagccccaggatgtaccctctgggaagcatatgctaatctgcatactgcagtcaatgaagagaaacacagagttcccaccttcccagacagagtgctgaagatacctcgggcagttcctgttctcaaaatggatgcaccatcttcaagtaccactctagcccaatatgacaacgaatcaaagaaaaactatggctcccagccaccatcttcaagtaccagtctagcgcaatatgacagcaactcaaagaaaatctatggctcccagccaaacttcaacatgcagtatattccaagggaagacttccctgactggtggcaagtaagaaaactgaaaagtagcagcagcagtgaagatgttgcaagcagtaaccaaaaagaaagaaatgtgaatcacaccacctcaaagatttcatgggaattccctgagtcaagttcatctgaagaagaggaaaacctggatgattatgactggtttgctggtaacatctccagatcacaatctgaacagttactcagacaaaagggaaaagaaggagcatttatggttagaaattcgagccaagtgggaatgtacacagtgtccttatttagtaaggctgtgaatgataaaaaaggaactgtcaaacattaccacgtgcatacaaatgctgagaacaaattatacctggcagaaaactactgttttgattccattccaaagcttattcattatcatcaacacaattcagcaggcatgatcacacggctccgccaccctgtgtcaacaaaggccaacaaggtccccgactctgtgtccctgggaaatggaatctgggaactgaaaagagaagagattaccttgttgaaggagctgggaagtggccagtttggagtggtccagctgggcaagtggaaggggcagtatgatgttgctgttaagatgatcaaggagggctccatgtcagaagatgaattctttcaggaggcccagactatgatgaaactcagccatcccaagctggttaaattctatggagtgtgttcaaaggaataccccatatacatagtgactgaatatataagcaatggctgcttgctgaattacctgaggagtcacggaaaaggacttgaaccttcccagctcttagaaatgtgctacgatgtctgtgaaggcatggccttcttggagagtcaccaattcatacaccgggacttggctgctcgtaactgcttggtggacagagatctctgtgtgaaagtatctgactttggaatgacaaggtatgttcttgatgaccagtatgtcagttcagtcggaacaaagtttccagtcaagtggtcagctccagaggtgtttcattacttcaaatacagcagcaagtcagacgtatgggcatttgggatcctgatgtgggaggtgttcagcctggggaagcagccctatgacttgtatgacaactcccaggtggttctgaaggtctcccagggccacaggctttaccggccccacctggcatcggacaccatctaccagatcatgtacagctgctggcacgagcttccagaaaagcgtcccacatttcagcaactcctgtcttccattgaaccacttcgggaaaaagacaagcattgaagaagaaattaggagtgctgataagaatgaatatagatgctggccagcattttcattcattttaaggaaagtaggaaggcataagtaattttagctagtttttaatagtgttctctgtattgtctattatttagaaatgaacaaggcaggaaacaaaagattcccttgaaatttagatcaaattagtaattttgttttatgctgctcctgatataacactttccagcctatagcagaagcacattttcagactgcaatatagagactgtgttcatgtgtaaagactgagcagaactgaaaaattacttattggatattcattcttttctttatattgtcattgtcacaacaattaaatatactaccaagtacagaaatgtggaaaaaaaaaaccg

SEQ ID NO: 42 - DNA, 4465 bp, Homo sapiens
caattgtcatacgacttgcagtgagcgtcaggagcacgtccaggaactcctcagcagcgcctccttcagctccacagccagacgccctcagacagcaaagcctacccccgcgccgcgccctgcccgccgctcggatgctcgcccgcgccctgctgctgtgcgcggtcctggcgctcagccatacagcaaatccttgctgttcccacccatgtcaaaaccgaggtgtatgtatgagtgtgggatttgaccagtataagtgcgattgtacccggacaggattctatggagaaaactgctcaacaccggaatttttgacaagaataaaattatttctgaaacccactccaaacacagtgcactacatacttacccacttcaagggattttggaacgttgtgaataacattcccttccttcgaaatgcaattatgagttatgtcttgacatccagatcacatttgattgacagtccaccaacttacaatgctgactatggctacaaaagctgggaagccttctctaacctctcctattatactagagcccttcctcctgtgcctgatgattgcccgactcccttgggtgtcaaaggtaaaaagcagcttcctgattcaaatgagattgtggaaaaattgcttctaagaagaaagttcatccctgatccccagggctcaaacatgatgtttgcattctttgcccagcacttcacgcatcagtttttcaagacagatcataagcgagggccagctttcaccaacgggctgggccatggggtggacttaaatcatatttacggtgaaactctggctagacagcgtaaactgcgccttttcaaggatggaaaaatgaaatatcagataattgatggagagatgtatcctcccacagtcaaagatactcaggcagagatgatctaccctcctcaagtccctgagcatctacggtttgctgtggggcaggaggtctttggtctggtgcctggtctgatgatgtatgccacaatctggctgcgggaacacaacagagtatgcgatgtgcttaaacaggagcatcctgaatggggtgatgagcagttgttccagacaagcaggctaatactgataggagagactattaagattgtgattgaagattatgtgcaacacttgagtggctatcacttcaaactgaaatttgacccagaactacttttcaacaaacaattccagtaccaaaatcgtattgctgctgaatttaacaccctctatcactggcatccccttctgcctgacacctttcaaattcatgaccagaaatacaactatcaacagtttatctacaacaactctatattgctggaacatggaattacccagtttgttgaatcattcaccaggcaaattgctggcagggttgctggtggtaggaatgttccacccgcagtacagaaagtatcacaggcttccattgaccagagcaggcagatgaaataccagtcttttaatgagtaccgcaaacgctttatgctgaagccctatgaatcatttgaagaacttacaggagaaaaggaaatgtctgcagagttggaagcactctatggtgacatcgatgctgtggagctgtatcctgcccttctggtagaaaagcctcggccagatgccatctttggtgaaaccatggtagaagttggagcaccattctccttgaaaggacttatgggtaatgttatatgttctcctgcctactggaagccaagcacttttggtggagaagtgggttttcaaatcatcaacactgcctcaattcagtctctcatctgcaataacgtgaagggctgtccctttacttcattcagtgttccagatccagagctcattaaaacagtcaccatcaatgcaagttcttcccgctccggactagatgatatcaatcccacagtactactaaaagaacgttcgactgaactgtagaagtctaatgatcatatttatttatttatatgaaccatgtctattaatttaattatttaataatatttatattaaactccttatgttacttaacatcttctgtaacagaagtcagtactcctgttgcggagaaaggagtcatacttgtgaagacttttatgtcactactctaaagattttgctgttgctgttaagtttggaaaacagtttttattctgttttataaaccagagagaaatgagttttgacgtctttttacttgaatttcaacttatattataagaacgaaagtaaagatgtttgaatacttaaacactatcacaagatggcaaaatgctgaaagtttttacactgtcgatgtttccaatgcatcttccatgatgcattagaagtaactaatgtttgaaattttaaagtacttttggttatttttctgtcatcaaacaaaaacaggtatcagtgcattattaaatgaatatttaaattagacattaccagtaatttcatgtctactttttaaaatcagcaatgaaacaataatttgaaatttctaaattcatagggtagaatcacctgtaaaagcttgtttgatttcttaaagttattaaacttgtacatataccaaaaagaagctgtcttggatttaaatctgtaaaatcagatgaaattttactacaattgcttgttaaaatattttataagtgatgttcctttttcaccaagagtataaacctttttagtgtgactgttaaaacttccttttaaatcaaaatgccaaatttattaaggtggtggagccactgcagtgttatctcaaaataagaatattttgttgagatattccagaatttgtttatatggctggtaacatgtaaaatctatatcagcaaaagggtctacctttaaaataagcaataacaaagaagaaaaccaaattattgttcaaatttaggtttaaacttttgaagcaaacttttttttatccttgtgcactgcaggcctggtactcagattttgctatgaggttaatgaagtaccaagctgtgcttgaataacgatatgttttctcagattttctgttgtacagtttaatttagcagtccatatcacattgcaaaagtagcaatgacctcataaaatacctcttcaaaatgcttaaattcatttcacacattaattttatctcagtcttgaagccaattcagtaggtgcattggaatcaagcctggctacctgcatgctgttccttttcttttcttcttttagccattttgctaagagacacagtcttctcatcacttcgtttctcctattttgttttactagttttaagatcagagttcactttctttggactctgcctatattttcttacctgaacttttgcaagttttcaggtaaacctcagctcaggactgctatttagctcctcttaagaagattaaaagagaaaaaaaaaggcccttttaaaaatagtatacacttattttaagtgaaaagcagagaattttatttatagctaattttagctatctgtaaccaagatggatgcaaagaggctagtgcctcagagagaactgtacggggtttgtgactggaaaaagttacgttcccattctaattaatgccctttcttatttaaaaacaaaaccaaatgatatctaagtagttctcagcaataataataatgacgataatacttcttttccacatctcattgtcactgacatttaatggtactgtatattacttaatttattgaagattattatttatgtcttattaggacactatggttataaactgtgtttaagcctacaatcattgatttttttttgttatgtcacaatcagtatattttctttggggttacctctctgaatattatgtaaacaatccaaagaaatgattgtattaagatttgtgaataaatttttagaaatctgattggcatattgagatatttaaggttgaatgtttgtccttaggataggcctatgtgctagcccacaaagaatattgtctcattagcctgaatgtgccataagactgaccttttaaaatgttttgagggatctgtggatgcttcgttaatttgttcagccacaatttattgagaaaatattctgtgtcaagcactgtgggttttaatatttttaaatcaaacgctgattacagataatagtatttatataaataattgaaaaaaattttcttttgggaagagggagaaaatgaaataaatatcattaaagataactcaggagaatcttctttacaattttacgtttagaatgtttaaggttaagaaagaaatagtcaatatgcttgtataaaacactgttcactgttttttttaaaaaaaaaacttgatttgttattaacattgatctgctgacaaaacctgggaatttgggttgtgtatgcgaatgtttcagtgcctcagacaaatgtgtatttaacttatgtaaaagataagtctggaaataaatgtctgtttatttttgtactattta

SEQ ID NO: 43 - DNA, 5434 bp, Homo sapiens
caagtgccgtcgccgcgccccttccccctcccgcctccccggccccctccccggaaccggcggtcgagctacggtcgcggacgagtggaaccgagactgccccgcggagccgccggtatgagcgcccctcgccaccccgtgtcccaggcccggcctttctgacaagagctagacttcgggctccttgaggatattcagttttgtatgtttgaatatcctctcaccatgttcagcataaagtaccattcttaatgattatcctcaacaagacaggtgtgagagggttgctgttgcattgcaatcatggtgcaaaaataccagtccccagtgagagtgtacaaatacccctttgaattaattatggctgcctatgaaaggaggttccctacatgtcctttgattccgatgttcgtgggcagtgacactgtgagtgaattcaagagcgaagatggggctattcatgtcattgaaaggcgctgcaagctggatgtagatgcacccagactgctgaagaagattgcaggagttgattatgtttattttgtccagaaaaactcactgaattctcgggaacgtactttgcacattgaggcttataatgaaacgttttccaatcgggtcatcattaatgagcattgctgctacaccgttcaccctgaaaatgaagattggacctgttttgaacagtctgcaagtttagatattaaatctttctttggttttgaaagtacagtggaaaaaattgcaatgaaacaatataccagcaacattaaaaaaggaaaggaaatcatcgaatactaccttcgccaattagaagaagaaggcataacctttgtgccccgttggagtccgccttccatcacgccctcttcagagacatcttcatcatcctccaagaaacaagcagcgtccatggccgtcgtcatcccagaagctgccctcaaggaggggctgagtggtgatgccctcagcagccccagtgcacctgagcccgtggtgggcacccctgacgacaaactagatgccgaccacatcaagagatacctgggcgatttgactccgctgcaggagagctgcctcattagacttcgccagtggctccaggagacccacaagggcaaaattccaaaagatgagcatattcttcggttcctccgtgcacgggattttaatattgacaaagccagagagatcatgtgtcagtctttgacgtggagaaagcagcatcaggtagactacattcttgaaacctggacccctcctcaggtccttcaggattactacgcgggaggctggcatcatcacgacaaagatgggcggcccctctacgtgctcaggctggggcagatggacaccaaaggcttggtgagagcgctcggggaggaagccctgctgagatacgttctctccgtaaatgaagaacggctaaggcgatgcgaagagaatacaaaagtctttggtcggcctatcagctcatggacctgcctggtggacttggaagggctgaacatgcgccacttgtggagacctggtgtgaaagcgctgctgcggatcatcgaggtggtggaggccaactaccctgagacactgggccgccttctcatcctgcgggcgcccagggtatttcctgtgctctggacgctggttagtccgttcattgatgacaacaccagaaggaagttcctcatttatgcaggaaatgactaccagggtcctggaggcctgctggattacatcgacaaagagattattccagatttcctgagtggggagtgcatgtgcgaagtgccagagggtggactggtccccaaatctctgtaccggactgcagaggagctggagaacgaagacctgaagctctggactgagaccatctaccagtctgcaagcgtcttcaaaggagccccacatgagattctcattcagattgtggatgcctcgtcagtcatcacttgggatttcgacgtgtgcaaaggggacattgtgtttaacatctatcactccaagaggtcgccacaaccacccaaaaaggactccctgggagcccacagcatcacctctccgggtgggaacaatgtgcagctcatagacaaagtctggcagctgggccgcgactacagcatggtggagtcgcctctgatctgcaaagaaggagaaagcgtgcagggttcccatgtgaccaggtggccgggcttctacatcctgcagtggaaattccacagcatgcctgcgtgcgccgccagcagccttccccgggtggacgacgtgcttgcgtccctgcaggtctcttcgcacaagtgtaaagtgatgtactacaccgaggtgatcggctcggaggatttcagaggttccatgacgagcctggagtccagccacagcggcttctcccagctgagtgccgccaccacctcctccagccagtcccactccagctccatgatctccaggtagtgccgcgctgcctgcacctagtgtgcagaggggacggccgcccctcctcggacagcagctgcacccgcccacccagcggcgacattgtacagactcctctcacctctagatagcaaatagctctcagatggtaaacgtagtcgtttgatcccaaaactaccttggcaggtagttttaactctgatcctaacttaactcaatagccatagattttgtatacgttgtgcacaaaatccaaccagagcgcaagggctctcttgaaagaaaagtagtttctgtaccaattaaaggattgacgtggtctcagatattgatgcaaaaaatttttccaacgaactccgcattgtccattagtgaatgaattcctgtgacatcctccagagatggcccctcctcacctgggacggaagctgccagctcgcttcccccaagctgcctcatggcccgcacgccgcctcacggcccccatgcttcccgccagtcaagatggtctgtggacttagggccagcccttgaggtccttatcctctgaggattcagaggttgcctgcggagtaccttgtcccagggccagacacacccacaccacccactgtctgcagtggggccgggggctcaggaggggctctcagggactcctggtgactccaggaaaatgctgccatcgttaaacattactttctctttcctccttttcaaatctttttgatactttttagagcaggatttttctgtatgtgaacttgggtgggggggttcttcccgtttccttccgtgcgtcgcccctctcacctgcagtcagctcccagcccagtgtaggccatctcctctgtgccctctggaggctcattgtctcagagcccagacagttccagccactaggaggccgtcttggaaccagcaagtcgcatttgccacttgacactgtccatggggttttattagtagctaagcagcagctctcgcatccacttcagggtggcgtgtggcatgtaggagtcctgcttctttgtacatgggaattgtggactcatgcgtgtgtgtgtgtgcatgtgctgtgtgtgtgcatgtgtgcatgacggtgggggtgctggggggacggggtgagtggaaacttagtttgagtaatgaaggaatcttcacagaagcaaatcagaatatgggatttgtttgccttttacattttgtttaattcctgattttaaagcctgctctatctggtacaggcccttattttttcagctttttatgggaaaagcaggttatttgagaatctgtccagaagttgcataggggatggcctccacgataaggacatgcaacacgtgtttctgtgtgcagcagaggccgtgtttttcatgccaaaccccacgcggctgtcaactgtgtgcgtggtaggcatggagatcctggttgtgccgtctcagctccgctctgaaggcactgtgtgggtgctgcgtgactggagagctgtgtggaggccatgtgtgccccgtgcagggatcaggagggcgggggagggaccgagcagccctcttgcccggtcgggtcagccctagtggctgcctgcacactgtagacgtcccagggcctgtgctgtgatcacctgcctttggaccacatttgtgtttgctcttagagatcgagctcctcagtggtacctgaagcctttgcttccggaaagcgcggtagggttcgtaggtagggctagtaggtagggttagtaggtagggctagtaggtagggctagtaggtagggttagtaggtagggttcgtaggtagggctggtaggtagggttagtaggtagggctagtaggtagggttcgtaggtagggctagtaggtagggttagtaggtagggctagtaggtagggctagtaggtagggttagtaggtagggttcgtaggtagggctggtaggtagggttagtaggtagggctagtaggtagggttcgtaggtagggctagtaggtagggttagtaggtagggctagtaggtagggctagtaggtagggttagtaggtagggttcgtaggtagggctggtaggtagggttagtaggtagggctagtaggtagggctagtaggtagggctagtaggtagggttagtaggtagggctagtaggtagggctagtaggtagggttagtaggtagggttcgtaggtagggctggtaggtagggttagtaggtagggctagtaggtagggctagtaggtagggctagtaggtagggctagtaggtagggctagtaggtagggctagtaggtagggctagtaggtagggttcgtaggtagggttcgtaggtagggttcgtaggtagggttagtagcgcgtctgtgctgcttccacctggtgcttcctgttcccaaatcacaagggcctgaaggtggtccctgctttctctttctctttctctgtgtctcagatggcgattttgctgacagctgccaagaaaatgcttcactcaacagtcctcatgtgcccagagatgtttatagaactgtttgaattgcagccatcccctgccccctcccaggctgaagatctgttctttttaagttgattcgggagtggcattcttttatacccaaagactgtagtgcatcttgaagagctcaaagcacatgaccgcacaaatgcttacagggtttcctcccgagtaatccaatctcactccccttgtaagggaattctggggcagctatggtttgagtatgcagtttgcatcgtgtttctacctttagtaccttgccactcttttaaaacgctgctgtcatttcccatttcttagtactaatgattctttgattctccctctattatgtcttaattcactttccttcctaaatttgttatttgcatatcaaattctgtaaatgttttgtaaacatattacctcacttggtaatacaatactgatagtctttaaaagatttttttattgttatcaataataaatgtgaactatttaaag

SEQ ID NO: 44 - DNA, 2986 bp, Homo sapiens
gcgccccagtcgacgctgagctcctctgctactcagagttgcaacctcagcctcgctatggctcccagcagcccccggcccgcgctgcccgcactcctggtcctgctcggggctctgttcccaggacctggcaatgcccagacatctgtgtccccctcaaaagtcatcctgccccggggaggctccgtgctggtgacatgcagcacctcctgtgaccagcccaagttgttgggcatagagaccccgttgcctaaaaaggagttgctcctgcctgggaacaaccggaaggtgtatgaactgagcaatgtgcaagaagatagccaaccaatgtgctattcaaactgccctgatgggcagtcaacagctaaaaccttcctcaccgtgtactggactccagaacgggtggaactggcacccctcccctcttggcagccagtgggcaagaaccttaccctacgctgccaggtggagggtggggcaccccgggccaacctcaccgtggtgctgctccgtggggagaaggagctgaaacgggagccagctgtgggggagcccgctgaggtcacgaccacggtgctggtgaggagagatcaccatggagccaatttctcgtgccgcactgaactggacctgcggccccaagggctggagctgtttgagaacacctcggccccctaccagctccagacctttgtcctgccagcgactcccccacaacttgtcagcccccgggtcctagaggtggacacgcaggggaccgtggtctgttccctggacgggctgttcccagtctcggaggcccaggtccacctggcactgggggaccagaggttgaaccccacagtcacctatggcaacgactccttctcggccaaggcctcagtcagtgtgaccgcagaggacgagggcacccagcggctgacgtgtgcagtaatactggggaaccagagccaggagacactgcagacagtgaccatctacagctttccggcgcccaacgtgattctgacgaagccagaggtctcagaagggaccgaggtgacagtgaagtgtgaggcccaccctagagccaaggtgacgctgaatggggttccagcccagccactgggcccgagggcccagctcctgctgaaggccaccccagaggacaacgggcgcagcttctcctgctctgcaaccctggaggtggccggccagcttatacacaagaaccagacccgggagcttcgtgtcctgtatggcccccgactggacgagagggattgtccgggaaactggacgtggccagaaaattcccagcagactccaatgtgccaggcttgggggaacccattgcccgagctcaagtgtctaaaggatggcactttcccactgcccatcggggaatcagtgactgtcactcgagatcttgagggcacctacctctgtcgggccaggagcactcaaggggaggtcacccgcgaggtgaccgtgaatgtgctctccccccggtatgagattgtcatcatcactgtggtagcagccgcagtcataatgggcactgcaggcctcagcacgtacctctataaccgccagcggaagatcaagaaatacagactacaacaggcccaaaaagggacccccatgaaaccgaacacacaagccacgcctccctgaacctatcccgggacagggcctcttcctcggccttcccatattggtggcagtggtgccacactgaacagagtggaagacatatgccatgcagctacacctaccggccctgggacgccggaggacagggcattgtcctcagtcagatacaacagcatttggggccatggtacctgcacacctaaaacactaggccacgcatctgatctgtagtcacatgactaagccaagaggaaggagcaagactcaagacatgattgatggatgttaaagtctagcctgatgagaggggaagtggtgggggagacatagccccaccatgaggacatacaactgggaaatactgaaacttgctgcctattgggtatgctgaggcccacagacttacagaagaagtggccctccatagacatgtgtagcatcaaaacacaaaggcccacacttcctgacggatgccagcttgggcactgctgtctactgaccccaacccttgatgatatgtatttattcatttgttattttaccagctatttattgagtgtcttttatgtaggctaaatgaacataggtctctggcctcacggagctcccagtccatgtcacattcaaggtcaccaggtacagttgtacaggttgtacactgcaggagagtgcctggcaaaaagatcaaatggggctgggacttctcattggccaacctgcctttccccagaaggagtgatttttctatcggcacaaaagcactatatggactggtaatggttcacaggttcagagattacccagtgaggccttattcctcccttccccccaaaactgacacctttgttagccacctccccacccacatacatttctgccagtgttcacaatgacactcagcggtcatgtctggacatgagtgcccagggaatatgcccaagctatgccttgtcctcttgtcctgtttgcatttcactgggagcttgcactattgcagctccagtttcctgcagtgatcagggtcctgcaagcagtggggaagggggccaaggtattggaggactccctcccagctttggaagggtcatccgcgtgtgtgtgtgtgtgtatgtgtagacaagctctcgctctgtcacccaggctggagtgcagtggtgcaatcatggttcactgcagtcttgaccttttgggctcaagtgatcctcccacctcagcctcctgagtagctgggaccataggctcacaacaccacacctggcaaatttgattttttttttttttttcagagacggggtctcgcaacattgcccagacttcctttgtgttagttaataaagctttctcaactgcc

SEQ ID NO: 45 - DNA, 4138 bp, Homo sapiens
cttctgtgctgttccttcttgcctctaacttgtaaacaagacgtactaggacgatgctaatggaaagtcacaaaccgctgggtttttgaaaggatccttgggacctcatgcacatttgtggaaactggatggagagatttggggaagcatggactctttagccagcttagttctctgtggagtcagcttgctcctttctggaactgtggaaggtgccatggacttgatcttgatcaattccctacctcttgtatctgatgctgaaacatctctcacctgcattgcctctgggtggcgcccccatgagcccatcaccataggaagggactttgaagccttaatgaaccagcaccaggatccgctggaagttactcaagatgtgaccagagaatgggctaaaaaagttgtttggaagagagaaaaggctagtaagatcaatggtgcttatttctgtgaagggcgagttcgaggagaggcaatcaggatacgaaccatgaagatgcgtcaacaagcttccttcctaccagctactttaactatgactgtggacaagggagataacgtgaacatatctttcaaaaaggtattgattaaagaagaagatgcagtgatttacaaaaatggttccttcatccattcagtgccccggcatgaagtacctgatattctagaagtacacctgcctcatgctcagccccaggatgctggagtgtactcggccaggtatataggaggaaacctcttcacctcggccttcaccaggctgatagtccggagatgtgaagcccagaagtggggacctgaatgcaaccatctctgtactgcttgtatgaacaatggtgtctgccatgaagatactggagaatgcatttgccctcctgggtttatgggaaggacgtgtgagaaggcttgtgaactgcacacgtttggcagaacttgtaaagaaaggtgcagtggacaagagggatgcaagtcttatgtgttctgtctccctgacccctatgggtgttcctgtgccacaggctggaagggtctgcagtgcaatgaagcatgccaccctggtttttacgggccagattgtaagcttaggtgcagctgcaacaatggggagatgtgtgatcgcttccaaggatgtctctgctctccaggatggcaggggctccagtgtgagagagaaggcataccgaggatgaccccaaagatagtggatttgccagatcatatagaagtaaacagtggtaaatttaatcccatttgcaaagcttctggctggccgctacctactaatgaagaaatgaccctggtgaagccggatgggacagtgctccatccaaaagactttaaccatacggatcatttctcagtagccatattcaccatccaccggatcctcccccctgactcaggagtttgggtctgcagtgtgaacacagtggctgggatggtggaaaagcccttcaacatttctgttaaagttcttccaaagcccctgaatgccccaaacgtgattgacactggacataactttgctgtcatcaacatcagctctgagccttactttggggatggaccaatcaaatccaagaagcttctatacaaacccgttaatcactatgaggcttggcaacatattcaagtgacaaatgagattgttacactcaactatttggaacctcggacagaatatgaactctgtgtgcaactggtccgtcgtggagagggtggggaagggcatcctggacctgtgagacgcttcacaacagcttctatcggactccctcctccaagaggtctaaatctcctgcctaaaagtcagaccactctaaatttgacctggcaaccaatatttccaagctcggaagatgacttttatgttgaagtggagagaaggtctgtgcaaaaaagtgatcagcagaatattaaagttccaggcaacttgacttcggtgctacttaacaacttacatcccagggagcagtacgtggtccgagctagagtcaacaccaaggcccagggggaatggagtgaagatctcactgcttggacccttagtgacattcttcctcctcaaccagaaaacatcaagatttccaacattacacactcctcggctgtgatttcttggacaatattggatggctattctatttcttctattactatccgttacaaggttcaaggcaagaatgaagaccagcacgttgatgtgaagataaagaatgccaccatcattcagtatcagctcaagggcctagagcctgaaacagcataccaggtggacatttttgcagagaacaacatagggtcaagcaacccagccttttctcatgaactggtgaccctcccagaatctcaagcaccagcggacctcggaggggggaagatgctgcttatagccatccttggctctgctggaatgacctgcctgactgtgctgttggcctttctgatcatattgcaattgaagagggcaaatgtgcaaaggagaatggcccaagccttccaaaacgtgagggaagaaccagctgtgcagttcaactcagggactctggccctaaacaggaaggtcaaaaacaacccagatcctacaatttatccagtgcttgactggaatgacatcaaatttcaagatgtgattggggagggcaattttggccaagttcttaaggcgcgcatcaagaaggatgggttacggatggatgctgccatcaaaagaatgaaagaatatgcctccaaagatgatcacagggactttgcaggagaactggaagttctttgtaaacttggacaccatccaaacatcatcaatctcttaggagcatgtgaacatcgaggctacttgtacctggccattgagtacgcgccccatggaaaccttctggacttccttcgcaagagccgtgtgctggagacggacccagcatttgccattgccaatagcaccgcgtccacactgtcctcccagcagctccttcacttcgctgccgacgtggcccggggcatggactacttgagccaaaaacagtttatccacagggatctggctgccagaaacattttagttggtgaaaactatgtggcaaaaatagcagattttggattgtcccgaggtcaagaggtgtacgtgaaaaagacaatgggaaggctcccagtgcgctggatggccatcgagtcactgaattacagtgtgtacacaaccaacagtgatgtatggtcctatggtgtgttactatgggagattgttagcttaggaggcacaccctactgcgggatgacttgtgcagaactctacgagaagctgccccagggctacagactggagaagcccctgaactgtgatgatgaggtgtatgatctaatgagacaatgctggcgggagaagccttatgagaggccatcatttgcccagatattggtgtccttaaacagaatgttagaggagcgaaagacctacgtgaataccacgctttatgagaagtttacttatgcaggaattgactgttctgctgaagaagcggcctaggacagaacatctgtataccctctgtttccctttcactggcatgggagacccttgacaactgctgagaaaacatgcctctgccaaaggatgtgatatataagtgtacatatgtgctggaattctaacaagtcataggttaatatttaagacactgaaaaatctaagtgatataaatcagattcttctctctcattttatccctcacctgtagcatgccagtcccgtttcatttagtcatgtgaccactctgtcttgtgtttccacagcctgcaagttcagtccaggatgctaacatctaaaaatagacttaaatctcattgcttacaagcctaagaatctttagagaagtatacataagtttaggataaaataatgggattttcttttcttttctctggtaatattgacttgtatattttaagaaataacagaaagcctgggtgacatttgggagacatgtgacatttatatattgaattaatatccctacatgtattgcacattgtaaaaagttttagttttgatgagttgtgagtttaccttgtatactgtaggcacactttgcactgatatatcatgagtgaataaatgtcttgcctactcaaaaaaaaaaaa

SEQ ID NO: 46 - DNA, 1204 bp, Homo sapiens
cggaacgagggcaacctgcacagccatgcccgggcaagaactcaggacggtgaatggctctcagatgctcctggtgttgctggtgctctcgtggctgccgcatgggggcgccctgtctctggccgaggcgagccgcgcaagtttcccgggaccctcagagttgcactccgaagactccagattccgagagttgcggaaacgctacgaggacctgctaaccaggctgcgggccaaccagagctgggaagattcgaacaccgacctcgtcccggcccctgcagtccggatactcacgccagaagtgcggctgggatccggcggccacctgcacctgcgtatctctcgggccgcccttcccgaggggctccccgaggcctcccgccttcaccgggctctgttccggctgtccccgacggcgtcaaggtcgtgggacgtgacacgaccgctgcggcgtcagctcagccttgcaagaccccaagcgcccgcgctgcacctgcgactgtcgccgccgccgtcgcagtcggaccaactgctggcagaatcttcgtccgcacggccccagctggagttgcacttgcggccgcaagccgccagggggcgccgcagagcgcgtgcgcgcaacggggacgactgtccgctcgggcccgggcgttgctgccgtctgcacacggtccgcgcgtcgctggaagacctgggctgggccgattgggtgctgtcgccacgggaggtgcaagtgaccatgtgcatcggcgcgtgcccgagccagttccgggcggcaaacatgcacgcgcagatcaagacgagcctgcaccgcctgaagcccgacacggagccagcgccctgctgcgtgcccgccagctacaatcccatggtgctcattcaaaagaccgacaccggggtgtcgctccagacctatgatgacttgttagccaaagactgccactgcatatgagcagtcctggtccttccactgtgcacctgcgcgggggaggcgacctcagttgtcctgccctgtggaatgggctcaaggttcctgagacacccgattcctgcccaaacagctgtatttatataagtctgttatttattattaatttattggggtgaccttcttggggactcgggggctggtctgatggaactgtgtatttatttaaaactctggtgataaaaataaagctgtctgaactgttaaaaaaaaaaa

SEQ ID NO: 47 - DNA, 3161 bp, Homo sapiens
aagctgcagttagccaagatcgcatcattgcactccagcctaggggacaagagcgcgagacttcatctcaaagatttttaaataatagctaaaggtatgctctctaggtcatccttagtttattagtactgtacttaaaaattatttttttaatagtcaattttgggagataattatttctttccttatattttccaattagttggtgtctaaaaataaatgttttgtctaattttagatcaggtatacattcacaaaagcataaatcatagtctcacaggaaattcaccaattttccatatgtcgtgagataactgtcctttctacaacctcataacaatgaatttatataattacctagattttcttagtgtgaatctacccattagttttattttcttggtagttatttttttccctcctctctgttactattggccttaaaatacacaggaggacggttacagtgtcctaatagctgttacatgtgtgtgtttcagcgtacttgaatcaagtgtacatttatagtaccaataaccgcctttacagctttacagttaacaattctctcacaaaactgtagagcattaggcatctgagagccatagagggccaactttgttccagagtgaacatgctttttttcctcaacatatacactactgattttttttaaaagtatgactttcaagtgaattaatgtattggttaggagaactgcttgctaagtccttattacctcttgttaaagcctcagaaggccgtgctgaaagccagaggggaaaaaaagagtaatgcacaggtatctcttttgcagtggtgactgtattttgagtaccttgtgtgacagggtattattacagcatcttgtgggaaaacctattaggcctttgcatgttaaagctgtataatttgttgggttgtgagtggtctgacttaaatgtgtattataaaatttagacatcaaattttcctactaactaactttattagatgcatacttggaagcacagtcatatcacactgggaggcaatgcaatgtggttacctggtcctaggtttgaactgtcttatttcaaaagatttctgaattaatttttccctagaatttctccttcattccaaagtacaaacatactttgaagaatgaaacagattgttcccatgaatgtatgctcatactcgactagaaacgatctatgttaaatgactgtgtatatgaattatttcaagtactaccccaaataactttcttattgctctgaaagaagaaaagcaatgtaaatcactatgattattgcacaaacaaccagaattctccaacaattttaagtaatctgatcctcttcttggagaaaattgttacctaatagtttttccttatgaatgttattactactggtataaatcaaatttctataaatttcctacttaaagtcttaaraactgggttcttcctttgatgttattcatgttcagaaagggaaacaacactttacttttttagggacaatttctagaatctatagtagtatcaggatatattttgctttaaaatatattttggttattttgaatacagacattggctccaaattttcatctttgcacaatagtatgacttttcactagaacttctcaacatttgggaactttgcaaatatgagcatcatatgtgttaaggctgtatcatttaatgctatgagatacattgttttctccctatgccaaacaggtgaacaaacgtagttgttttttactgatactaaatgttggctacctgtgattttatagtatgcacatgtcagaaaaaggcaagacaaatggcctcttgtactgaatacttcggcaaacttattggggtcttcattttctgacagacaggatttgactcaatatttgtagagcttgcgtaggaatgggattacatgggtagtgatgcactggtaggaaatggtttttagttattgactcaggaattcatctcaggatgaatcttttatgtctttttattgtaaggcatatctggaatttactttataaaggtggggtttaggaaagctttgtcctaaaaattgggccccggggatgggaacttcattttcagttgccaaggggtagaaaaataatatgtgtgttgttatgtttatgttaacatattattaggtactatctatgaatgtatttaaatatttttcatattctgtgacaagcatttataatttgcaacaagtggagtccatttagcccagtgggaaagtcttggaactcaggttacccttgaaggatatgctggcagccatctctttgatctgtgcttaaactgtaatttatagaccagctaaatccctaacttggatctggaatgcattagttatgaccttgtaccattcccagaatttcaggggcatcgtgggtttggtctagtgattgaaaacacaagaacagagagatccagctgaaaaagagtgatcctcaatatcctaactaactggtcctcaactcaagcagagtttcttcactctggcactgtgatcatgaaacttagtagaggggattgtgtgtattttatacaaatttaatacaatgtcttacattgataaaattcttaaagagcaaaactgcattttatttctgcatccacattccaatcatattagaactaagatatttatctatgaagatataaatggtgcagagagactttcatctgtggattgcgttgtttctctagggttcctcagccactgatgcctcgccacaagccatgtgatatgtgaaataaaaagggattcttcctatagcctaaatgaagttccctctggggagagttctggtactgcaatcacaatgccagatggtgtttatgggctatttgtgtaagtaagtggtaagatgctatgaagtaagtgtgtttgttttcatcttatggaaactcttgatgcatgtgcttttgtatggaataaattttggtgcaatatgatgtcattcaactttgcattgaattgaattttggttgtatttatatgtattatacctgtcacgcttctagttgcttcaaccattttataaccatttttgtacatattttacttgaaaatattttaaatggaaatttaaataaacatttgatagtttacataaaaaaaaaaaaaaaaaaa

SEQ ID NO: 48 - DNA, 5722 bp, Homo sapiens
ggacgcacaggcattccccgcgcccctccagccctcgccgccctcgccaccgctcccggccgccgcgctccggtacacacaggatccctgctgggcaccaacagctccaccatggggctggcctggggactaggcgtcctgttcctgatgcatgtgtgtggcaccaaccgcattccagagtctggcggagacaacagcgtgtttgacatctttgaactcaccggggccgcccgcaaggggtctgggcgccgactggtgaagggccccgacccttccagcccagctttccgcatcgaggatgccaacctgatcccccctgtgcctgatgacaagttccaagacctggtggatgctgtgcgggcagaaaagggtttcctccttctggcatccctgaggcagatgaagaagacccggggcacgctgctggccctggagcggaaagaccactctggccaggtcttcagcgtggtgtccaatggcaaggcgggcaccctggacctcagcctgaccgtccaaggaaagcagcacgtggtgtctgtggaagaagctctcctggcaaccggccagtggaagagcatcaccctgtttgtgcaggaagacagggcccagctgtacatcgactgtgaaaagatggagaatgctgagttggacgtccccatccaaagcgtcttcaccagagacctggccagcatcgccagactccgcatcgcaaaggggggcgtcaatgacaatttccagggggtgctgcagaatgtgaggtttgtctttggaaccacaccagaagacatcctcaggaacaaaggctgctccagctctaccagtgtcctcctcacccttgacaacaacgtggtgaatggttccagccctgccatccgcactaactacattggccacaagacaaaggacttgcaagccatctgcggcatctcctgtgatgagctgtccagcatggtcctggaactcaggggcctgcgcaccattgtgaccacgctgcaggacagcatccgcaaagtgactgaagagaacaaagagttggccaatgagctgaggcggcctcccctatgctatcacaacggagttcagtacagaaataacgaggaatggactgttgatagctgcactgagtgtcactgtcagaactcagttaccatctgcaaaaaggtgtcctgccccatcatgccctgctccaatgccacagttcctgatggagaatgctgtcctcgctgttggcccagcgactctgcggacgatggctggtctccatggtccgagtggacctcctgttctacgagctgtggcaatggaattcagcagcgcggccgctcctgcgatagcctcaacaaccgatgtgagggctcctcggtccagacacggacctgccacattcaggagtgtgacaaaagatttaaacaggatggtggctggagccactggtccccgtggtcatcttgttctgtgacatgtggtgatggtgtgatcacaaggatccggctctgcaactctcccagcccccagatgaatgggaaaccctgtgaaggcgaagcgcgggagaccaaagcctgcaagaaagacgcctgccccatcaatggaggctggggtccttggtcaccatgggacatctgttctgtcacctgtggaggaggggtacagaaacgtagtcgtctctgcaacaaccccgcaccccagtttggaggcaaggactgcgttggtgatgtaacagaaaaccagatctgcaacaagcaggactgtccaattgatggatgcctgtccaatccctgctttgccggcgtgaagtgtactagctaccctgatggcagctggaaatgtggtgcttgtccccctggttacagtggaaatggcatccagtgcacagatgttgatgagtgcaaagaagtgcctgatgcctgcttcaaccacaatggagagcaccggtgtgagaacacggaccccggctacaactgcctgccctgccccccacgcttcaccggctcacagcccttcggccagggtgtcgaacatgccacggccaacaaacaggtgtgcaagccccgtaacccctgcacggatgggacccacgactgcaacaagaacgccaagtgcaactacctgggccactatagcgaccccatgtaccgctgcgagtgcaagcctggctacgctggcaatggcatcatctgcggggaggacacagacctggatggctggcccaatgagaacctggtgtgcgtggccaatgcgacttaccactgcaaaaaggataattgccccaaccttcccaactcagggcaggaagactatgacaaggatggaattggtgatgcctgtgatgatgacgatgacaatgataaaattccagatgacagggacaactgtccattccattacaacccagctcagtatgactatgacagagatgatgtgggagaccgctgtgacaactgtccctacaaccacaacccagatcaggcagacacagacaacaatggggaaggagacgcctgtgctgcagacattgatggagacggtatcctcaatgaacgggacaactgccagtacgtctacaatgtggaccagagagacactgatatggatggggttggagatcagtgtgacaattgccccttggaacacaatccggatcagctggactctgactcagaccgcattggagatacctgtgacaacaatcaggatattgatgaagatggccaccagaacaatctggacaactgtccctatgtgcccaatgccaaccaggctgaccatgacaaagatggcaagggagatgcctgtgaccacgatgatgacaacgatggcattcctgatgacaaggacaactgcagactcgtgcccaatcccgaccagaaggactctgacggcgatggtcgaggtgatgcctgcaaagatgattttgaccatgacagtgtgccagacatcgatgacatctgtcctgagaatgttgacatcagtgagaccgatttccgccgattccagatgattcctctggaccccaaagggacatcccaaaatgaccctaactgggttgtacgccatcagggtaaagaactcgtccagactgtcaactgtgatcctggactcgctgtaggttatgatgagtttaatgctgtggacttcagtggcaccttcttcatcaacaccgaaagggacgatgactatgctggatttgtctttggctaccagtccagcagccgcttttatgttgtgatgtggaagcaagtcacccagtcctactgggacaccaaccccacgagggctcagggatactcgggcctttctgtgaaagttgtaaactccaccacagggcctggcgagcacctgcggaacgccctgtggcacacaggaaacacccctggccaggtgcgcaccctgtggcatgaccctcgtcacataggctggaaagatttcaccgcctacagatggcgtctcagccacaggccaaagacgggtttcattagagtggtgatgtatgaagggaagaaaatcatggctgactcaggacccatctatgataaaacctatgctggtggtagactagggttgtttgtcttctctcaagaaatggtgttcttctctgacctgaaatacgaatgtagagatccctaatcatcaaattgttgattgaaagactgatcataaaccaatgctggtattgcaccttctggaactatgggcttgagaaaacccccaggatcacttctccttggcttccttcttttctgtgcttgcatcagtgtggactcctagaacgtgcgacctgcctcaagaaaatgcagttttcaaaaacagactcatcagcattcagcctccaatgaataagacatcttccaagcatataaacaattgctttggtttccttttgaaaaagcatctacttgcttcagttgggaaggtgcccattccactctgcctttgtcacagagcagggtgctattgtgaggccatctctgagcagtggactcaaaagcattttcaggcatgtcagagaagggaggactcactagaattagcaaacaaaaccaccctgacatcctccttcaggaacacggggagcagaggccaaagcactaaggggagggcgcatacccgagacgattgtatgaagaaaatatggaggaactgttacatgttcggtactaagtcattttcaggggattgaaagactattgctggatttcatgatgctgactggcgttagctgattaacccatgtaaataggcacttaaatagaagcaggaaagggagacaaagactggcttctggacttcctccctgatccccacccttactcatcaccttgcagtggccagaattagggaatcagaatcaaaccagtgtaaggcagtgctggctgccattgcctggtcacattgaaattggtggcttcattctagatgtagcttgtgcagatgtagcaggaaaataggaaaacctaccatctcagtgagcaccagctgcctcccaaaggaggggcagccgtgcttatatttttatggttacaatggcacaaaattattatcaacctaactaaaacattccttttctcttttttccgtaattactaggtagttttctaattctctcttttggaagtatgatttttttaaagtctttacgatgtaaaatatttattttttacttattctggaagatctggctgaaggattattcatggaacaggaagaagcgtaaagactatccatgtcatctttgttgagagtcttcgtgactgtaagattgtaaatacagattatttattaactctgttctgcctggaaatttaggcttcatacggaaagtgtttgagagcaagtagttgacatttatcagcaaatctcttgcaagaacagcacaaggaaaatcagtctaataagctgctctgccccttgtgctcagagtggatgttatgggattccttttttctctgttttatcttttcaagtggaattagttggttatccatttgcaaatgttttaaattgcaaagaaagccatgaggtcttcaatactgttttaccccatcccttgtgcatatttccagggagaaggaaagcatatacacttttttctttcatttttccaaaagagaaaaaaatgacaaaaggtgaaacttacatacaaatattacctcatttgttgtgtgactgagtaaagaatttttggatcaagcggaaagagtttaagtgtctaacaaacttaaagctactgtagtacctaaaaagtcagtgttgtacatagcataaaaactctgcagagaagtattcccaataaggaaatagcattgaaatgttaaatacaatttctgaaagttatgttttttttctatcatctggtataccattgctttatttttataaattattttctcattgccattggaatagaatattcagattgtgtagatatgctatttaaataatttatcaggaaatactgcctgtagagttagtatttctatttttatataatgtttgcacactgaattgaagaattgttggttttttcttttttttgttttttttttttttttttttttttttgcttttgacctcccatttttactatttgccaatacctttttctaggaatgtgcttttttttgtacacatttttatccattttacattctaaagcagtgtaagttgtatattactgtttcttatgtacaaggaacaacaataaatcatatggaaatttatattt

SEQ ID NO: 49 - DNA, 2330 bp, Homo sapiens
gtgagcgtgtgtgcgtgcgtctactttgtactgggaagaacacagcccatgtgctctgcatggacgttactgatactctgtttagcttgattttcgaaaagcaggcaagatgtccagcacaccacatgaccccttctattcttctcctttcggcccattttataggaggcatacaccatacatggtacagccagagtaccgaatctatgagatgaacaagagactgcagtctcgcacagaggatagtgacaacctctggtgggacgcctttgccactgaattttttgaagatgacgccacattaaccctttcattttgtttggaagatggaccaaagcgatacactatcggcaggaccctcatcccccgttactttagcactgtgtttgaaggaggggtgaccgacctgtattacattctcaaacactcgaaagagtcataccacaactcatccatcacggtggactgcgaccagtgtaccatggtcacccagcacgggaagcccatgtttaccaaggtatgtacagaaggcagactgatcttggagttcacctttgatgatctcatgagaatcaaaacatggcactttaccattagacaataccgagagttagtcccgagaagcatcctagccatgcatgcacaagatcctcaggtcctggatcagctgtccaaaaacatcaccaggatggggctaacaaacttcaccctcaactacctcaggttgtgtgtaatattggagccaatgcaggaactgatgtcgagacataaaacttacaacctcagtccccgagactgcctgaagacctgcttgtttcagaagtggcagaggatggtggctccgccagcagaacccacaaggcaaccaacaaccaaacggagaaaaaggaaaaattccaccagcagcacttccaacagcagcgctgggaacaatgcaaacagcactggcagcaagaagaagaccacagctgcaaacctgagtctgtccagtcaggtacctgatgtgatggtggtaggagagccaactctgatgggaggtgagtttggggacgaggacgaaaggctaatcactagattagaaaacacgcaatatgatgcggccaacggcatggacgacgaggaggacttcaacaattcacccgcgctggggaacaacagcccgtggaacagtaaacctcccgccactcaagagaccaaatcagaaaaccccccaccccaggcttcccaataagatgatcggcaccagaatccactgtcaataggcccgtgggtgatcattacaattgcaaatctttacttacaggagaggaaacagaagagataaaaacttttccatgcaaatatctatttctaaaccacaatgatctgattttctttcttctttctttttttctaattgagaggattattcccagtaagcttccatgaccctttcttggaggccttcacaggtaatacagatactggcactgattgtaattaaaatgagagaaaactctagcgcatcttctggcacggttttaacaacgtgtttgtgttgaatttcctttttatgcatcaaacgaaggccatattgtccataaatgctcagtgctcaggatctcattaatatgccgaacctaactacagatgactttttaatattgtaaaatattttctgctttttgacttgcatctgagagtttcttgtttcagtaaaaaaagaaaagacaaaaaaatcagctttggaaagtaatttaaatgtaccttattttttttttctttatgttttctttcattgggcaacagctaagagggcccagcaaggtaatttatggttgagctgatgtcaattggttcttgtcttgagtcgactcaatttagcccaagtgctgaaacaagaaatgtcatttttttcatcaaagacaccagggcagatttttaagtaaagaaagacaattggacccttaagaatttatgcatttgtaaagttgctgttgatccaaatattttcaagccatgtaatccattggttttgtgggcagtttaataaacctgaacctttgtgtgttttctaattgtacctgagttgaccatcctttctttttatagtatatttcttgtatgatattttgtaaagctctcacctggttcttttatggggacttttcgtttttgggcaactccagtgtatttatgtgaaactttataagagaattaatttttccatttgcatattaatatgttcctccacacatgtaaaggcacagtggctccgtgtgttaaaaaacagctgtattttatgtatgctttactgataagtgtgccaataataaactgtgttaatgacc

SEQ ID NO: 50 - DNA, 622 bp, Homo sapiens
ggcacgagctcgtgccggccttcagttgtttcgggacgcgccgagcttcgccgctcttccagcggctccgctgccagagctagcccgagcccggttctggggcgaaaatgcctgcccttcacatcgaagatttgccagagaaggaaaaactgaaaatggaagttgagcagcttcgcaaagaagtgaagttgcagagacaacaagtgtctaaatgttctgaagaaataaagaactatattgaagaacgttctggagaggatcctctagtaaagggaattccagaagacaagaacccctttaaagaaaaaggcagctgtgttatttcataaataacttgggagaaactgcatcctaagtggaagaactagtttgttttagttttcccagataaaaccaacatgctttttaaggaaggaagaatgaaattaaaaggagactttcttaagcaccatatagatagggttatgtataaaagcatatgtgctactcatctttgctcactatgcagtcttttttaagagagcagagagtatcagatgtacaattatggaaataagaacattacttgagcatgacacttctttcagtatattgcttgatgcttcaaataaagttttgtctt

SEQ ID NO: 51 - DNA, 2500 bp, Homo sapiens
cggggggatcttggctgtgtgtctgcggatctgtagtggcggcggcggcggcggcggcggggaggcagcaggcgcgggagcgggcgcaggagcaggcggcggcggtggcggcggcggttagacatgaacgccgcctcggcgccggcggtgcacggagagccccttctcgcgcgcgggcggtttgtgtgattttgctaaaatgcatcaccaacagcgaatggctgccttagggacggacaaagagctgagtgatttactggatttcagtgcgatgttttcacctcctgtgagcagtgggaaaaatggaccaacttctttggcaagtggacattttactggctcaaatgtagaagacagaagtagctcagggtcctgggggaatggaggacatccaagcccgtccaggaactatggagatgggactccctatgaccacatgaccagcagggaccttgggtcacatgacaatctctctccaccttttgtcaattccagaatacaaagtaaaacagaaaggggctcatactcatcttatgggagagaatcaaacttacagggttgccaccagcagagtctccttggaggtgacatggatatgggcaacccaggaaccctttcgcccaccaaacctggttcccagtactatcagtattctagcaataatccccgaaggaggcctcttcacagtagtgccatggaggtacagacaaagaaagttcgaaaagttcctccaggtttgccatcttcagtctatgctccatcagcaagcactgccgactacaatagggactcgccaggctatccttcctccaaaccagcaaccagcactttccctagctccttcttcatgcaagatggccatcacagcagtgacccttggagctcctccagtgggatgaatcagcctggctatgcaggaatgttgggcaactcttctcatattccacagtccagcagctactgtagcctgcatccacatgaacgtttgagctatccatcacactcctcagcagacatcaattccagtcttcctccgatgtccactttccatcgtagtggtacaaaccattacagcacctcttcctgtacgcctcctgccaacgggacagacagtataatggcaaatagaggaagcggggcagccggcagctcccagactggagatgctctggggaaagcacttgcttcgatctattctccagatcacactaacaacagcttttcatcaaacccttcaactcctgttggctctcctccatctctctcagcaggcacagctgtttggtctagaaatggaggacaggcctcatcgtctcctaattatgaaggacccttacactctttgcaaagccgaattgaagatcgtttagaaagactggatgatgctattcatgttctccggaaccatgcagtgggcccatccacagctatgcctggtggtcatggggacatgcatggaatcattggaccttctcataatggagccatgggtggtctgggctcagggtatggaaccggccttctttcagccaacagacattcactcatggtggggacccatcgtgaagatggcgtggccctgagaggcagccattctcttctgccaaaccaggttccggttccacagcttcctgtccagtctgcgacttcccctgacctgaacccaccccaggacccttacagaggcatgccaccaggactacaggggcagagtgtctcctctggcagctctgagatcaaatccgatgacgagggtgatgagaacctgcaagacacgaaatcttcggaggacaagaaattagatgacgacaagaaggatatcaaatcaattactagcaataatgacgatgaggacctgacaccagagcagaaggcagagcgtgagaaggagcggaggatggccaacaatgcccgagagcgtctgcgggtccgtgacatcaacgaggctttcaaagagctcggccgcatggtgcagctccacctcaagagtgacaagccccagaccaagctcctgatcctccaccaggcggtggccgtcatcctcagtctggagcagcaagtccgagaaaggaatctgaatccgaaagctgcgtgtctgaaaagaagggaggaagagaaggtgtcctcggagcctccccctctctccttggccggcccacaccctggaatgggagacgcatcgaatcacatgggacagatgtaaaagggtccaagttgccacattgcttcattaaaacaagagaccacttccttaacagctgtattatcttaaacccacataaacacttctccttaacccccatttttgtaatataagacaagtctgagtagttatgaatcgcagacgcaagaggtttcagcattcccaattatcaaaaaacagaaaaacaaaaaaaagaaagaaaaaagtgcaacttgagggacgactttctttaacatatcattcagaatgtgcaaagcagtatgtacaggctgagacacagcccagagactgaacggc

SEQ ID NO: 52 - DNA, 2875 bp, Homo sapiens
gaattctccggagctgaaaaaggatcctgactgaaagctagaggcattgaggagcctgaagattctcaggttttaaagacgctagagtgccaaagaagactttgaagtgtgaaaacatttcctgtaattgaaaccaaaatgtcatttatagatccttaccagcacattatagtggagcaccagtattcccacaagtttacggtagtggtgttacgtgccaccaaagtgacaaagggggcctttggtgacatgcttgatactccagatccctatgtggaactttttatctctacaacccctgacagcaggaagagaacaagacatttcaataatgacataaaccctgtgtggaatgagacctttgaatttattttggatcctaatcaggaaaatgttttggagattacgttaatggatgccaattatgtcatggatgaaactctagggacagcaacatttactgtatcttctatgaaggtgggagaaaagaaagaagttccttttattttcaaccaagtcactgaaatggttctagaaatgtctcttgaagtttgctcatgcccagacctacgatttagtatggctctgtgtgatcaggagaagactttcagacaacagagaaaagaacacataagggagagcatgaagaaactcttgggtccaaagaatagtgaaggattgcattctgcacgtgatgtgcctgtggtagccatattgggttcaggtgggggtttccgagccatggtgggattctctggtgtgatgaaggcattatacgaatcaggaattctggattgtgctacctacgttgctggtctttctggctccacctggtatatgtcaaccttgtattctcaccctgattttccagagaaagggccagaggagattaatgaagaactaatgaaaaatgttagccacaatccccttttacttctcacaccacagaaagttaaaagatatgttgagtctttatggaagaagaaaagctctggacaacctgtcacctttactgacatctttgggatgttaataggagaaacactaattcataatagaatgaatactactctgagcagtttgaaggaaaaagttaatactgcacaatgccctttacctcttttcacctgtcttcatgtcaaacctgacgtttcagagctgatgtttgcagattgggttgaatttagtccatacgaaattggcatggctaaatatggtacttttatggctcccgacttatttggaagcaaattttttatgggaacagtcgttaagaagtatgaagaaaaccccttgcatttcttaatgggtgtctggggcagtgccttttccatattgttcaacagagttttgggcgtttctggttcacaaagcagaggctccacaatggaggaagaattagaaaatattaccacaaagcatattgtgagtaatgatagctcggacagtgatgatgaatcacacgaacccaaaggcactgaaaatgaagatgctggaagtgactatcaaagtgataatcaagcaagttggattcatcgtatgataatggccttggtgagtgattcagctttattcaataccagagaaggacgtgctgggaaggtacacaacttcatgctgggcttgaatctcaatacatcttatccactgtctcctttgagtgactttgccacacaggactcctttgatgatgatgaactggatgcagctgtagcagatcctgatgaatttgagcgaatatatgagcctctggatgtcaaaagtaaaaagattcatgtagtggacagtgggctcacatttaacctgccgtatcccttgatactgagacctcagagaggggttgatctcataatctcctttgacttttctgcaaggccaagtgactctagtcctccgttcaaggaacttctacttgcagaaaagtgggctaaaatgaacaagctcccctttccaaagattgatccttatgtgtttgatcgggaagggctgaaggagtgctatgtctttaaacccaagaatcctgatatggagaaagattgcccaaccatcatccactttgttctggccaacatcaacttcagaaagtacaaggctccaggtgttccaagggaaactgaggaagagaaagaaatcgctgactttgatatttttgatgacccagaatcaccattttcaaccttcaattttcaatatccaaatcaagcattcaaaagactacatgatcttatgcacttcaatactctgaacaacattgatgtgataaaagaagccatggttgaaagcattgaatatagaagacagaatccatctcgttgctctgtttcccttagtaatgttgaggcaagaagatttttcaacaaggagtttctaagtaaacccaaagcatagttcatgtactggaaatggcagcagtttctgatgctgaggcagtttgcaatcccatgacaactggatttaaaagtacagtacagatagtcgtactgatcatgagagactggctgatactcaaagttgcagttacttagctgcatgagaataatactattataagttaggtgacaaatgatgttgattatgtaaggatatacttagctacattttcagtcagtatgaacttcctgatacaaatgtagggatatatactgtatttttaaacatttctcaccaactttcttatgtgtgttctttttaaaaattttttttcttttaaaatatttaacagttcaatctcaataagacctcgcattatgtatgaatgttattcactgactagatttattcataccatgagacaacactatttttatttatatatgcatatatatacatacatgaaataaatacatcaatataaaaataaaaaaaaacggaattc

SEQ ID NO: 53 - DNA, 1142 bp, Homo sapiens
gccgccagcggctttctcggacgccttgcccagcgggccgcccgaccccctgcaccatggaccccgctcgccccctggggctgtcgattctgctgcttttcctgacggaggctgcactgggcgatgctgctcaggagccaacaggaaataacgcggagatctgtctcctgcccctagactacggaccctgccgggccctacttctccgttactactacgacaggtacacgcagagctgccgccagttcctgtacgggggctgcgagggcaacgccaacaatttctacacctgggaggcttgcgacgatgcttgctggaggatagaaaaagttcccaaagtttgccggctgcaagtgagtgtggacgaccagtgtgaggggtccacagaaaagtatttctttaatctaagttccatgacatgtgaaaaattcttttccggtgggtgtcaccggaaccggattgagaacaggtttccagatgaagctacttgtatgggcttctgcgcaccaaagaaaattccatcattttgctacagtccaaaagatgagggactgtgctctgccaatgtgactcgctattattttaatccaagatacagaacctgtgatgctttcacctatactggctgtggagggaatgacaataactttgttagcagggaggattgcaaacgtgcatgtgcaaaagctttgaaaaagaaaaagaagatgccaaagcttcgctttgccagtagaatccggaaaattcggaagaagcaattttaaacattcttaatatgtcatcttgtttgtctttatggcttatttgcctttatggttgtatctgaagaataatatgacagcatgaggaaacaaatcattggtgatttattcaccagtttttattaatacaagtcactttttcaaaaatttggatttttttatatataactagctgctattcaaatgtgagtctaccatttttaatttatggttcaactgtttgtgagacgaattcttgcaatgcataagatataaaagcaaatatgactcactcatttcttggggtcgtattcctgatttcagaagaggatcataactgaaacaacataagacaatataatcatgtgcttttaacatatttgagaataaaaaggactagcc

SEQ ID NO: 54 - DNA, 7787 bp, Homo sapiens
gagacaaaggctgccgtcgggacgggcgagttagggacttgggtttgggcgaacaaaaggtgagaaggacaagaagggaccgggcgatggcagcaggggagccccgcgggcgcgcgtcctcgggagtggcgccgtgacacgcatggtttccccggacccgcggcggcgctgacttccgcgagtcggagcggcactcggcgagtccgggactgcgctggaacaatggataacttcttcaccgagggaacacgggtctggctgagagaaaatggccagcattttccaagtactgtaaattcctgtgcagaaggcatcgtcgtcttccggacagactatggtcaggtattcacttacaagcagagcacaattacccaccagaaggtgactgctatgcaccccacgaacgaggagggcgtggatgacatggcgtccttgacagagctccatggcggctccatcatgtataacttattccagcggtataagagaaatcaaatatatacctacatcggctccatcctggcctccgtgaacccctaccagcccatcgccgggctgtacgagcctgccaccatggagcagtacagccggcgccacctgggcgagctgcccccgcacatcttcgccatcgccaacgagtgctaccgctgcctgtggaagcgctacgacaaccagtgcatcctcatcagtggtgaaagtggggcaggtaaaaccgaaagcactaaattgatcctcaagtttctgtcagtcatcagtcaacagtctttggaattgtccttaaaggagaagacatcctgtgttgaacgagctattcttgaaagcagccccatcatggaagctttcggcaatgcgaagaccgtgtacaacaacaactctagtcgctttgggaagtttgttcagctgaacatctgtcagaaaggaaatattcagggcgggagaattgtagattatttattagaaaaaaaccgagtagtaaggcaaaatcccggggaaaggaattatcacatattttatgcactgctggcagggctggaacatgaagaaagagaagaattttatttatctacgccagaaaactaccactacttgaatcagtctggatgtgtagaagacaagacaatcagtgaccaggaatcctttagggaagttattacggcaatggacgtgatgcagttcagcaaggaggaagttcgggaagtgtcgaggctgcttgctggtatactgcatcttgggaacatagaatttatcactgctggtggggcacaggtttccttcaaaacagctttgggcagatctgcggagttacttgggctggacccaacacagctcacagatgctttgacccagagatcaatgttcctcaggggagaagagatcctcacgcctctcaatgttcaacaggcagtagacagcagggactccctggccatggctctgtatgcgtgctgctttgagtgggtaatcaagaagatcaacagcaggatcaaaggcaatgaggacttcaagtctattggcatcctcgacatctttggatttgaaaactttgaggttaatcactttgaacagttcaatataaactatgcaaacgagaaacttcaggagtacttcaacaagcatattttttctttagaacaactagaatatagccgggaaggattagtgtgggaagatattgactggatagacaatggagaatgcctggacttgattgagaagaaacttggcctcctagcccttatcaatgaagaaagccattttcctcaagccacagacagcaccttattggagaagctacacagtcagcatgcgaataaccacttttatgtgaagcccagagttgcagttaacaattttggagtgaagcactatgctggagaggtgcaatatgatgtccgaggtatcttggagaagaacagagatacatttcgagatgaccttctcaatttgctaagagaaagccgatttgactttatctacgatctttttgaacatgtttcaagccgcaacaaccaggataccttgaaatgtggaagcaaacatcggcggcctacagtcagctcacagttcaaggactcactgcattccttaatggcaacgctaagctcctctaatcctttctttgttcgctgtatcaagccaaacatgcagaagatgccagaccagtttgaccaggcggttgtgctgaaccagctgcggtactcagggatgctggagactgtgagaatccgcaaagctgggtatgcggtccgaagaccctttcaggacttttacaaaaggtataaagtgctgatgaggaatctggctctgcctgaggacgtccgagggaagtgcacgagcctgctgcagctctatgatgcctccaacagcgagtggcagctggggaagaccaaggtctttcttcgagaatccttggaacagaaactggagaagcggagggaagaggaagtgagccacgcggccatggtgattcgggcccatgtcttgggcttcttagcacgaaaacaatacagaaaggtcctttattgtgtggtgataatacagaagaattacagagcattccttctgaggaggagatttttgcacctgaaaaaggcagccatagttttccagaagcaactcagaggtcagattgctcggagagtttacagacaattgctggcagagaaaagggagcaagaagaaaagaagaaacaggaagaggaagaaaagaagaaacgggaggaagaagaaagagaaagagagagagagcgaagagaagccgagctccgcgcccagcaggaagaagaaacgaggaagcagcaagaactcgaagccttgcagaagagccagaaggaagctgaactgacccgtgaactggagaaacagaaggaaaataagcaggtggaagagatcctccgtctggagaaagaaatcgaggacctgcagcgcatgaaggagcagcaggagctgtcgctgaccgaggcttccctgcagaagctgcaggagcggcgggaccaggagctccgcaggctggaggaggaagcgtgcagggcggcccaggagttcctcgagtccctcaatttcgacgagatcgacgagtgtgtccggaatatcgagcggtccctgtcggtgggaagcgaattttccagcgagctggctgagagcgcatgcgaggagaagcccaacttcaacttcagccagccctacccagaggaggaggtcgatgagggcttcgaagccgacgacgacgccttcaaggactcccccaaccccagcgagcacggccactcagaccagcgaacaagtggcatccggaccagcgatgactcttcagaggaggacccatacatgaacgacacggtggtgcccaccagccccagtgcggacagcacggtgctgctcgccccatcagtgcaggactccgggagcctacacaactcctccagcggcgagtccacctactgcatgccccagaacgctggggacttgccctccccagacggcgactacgactacgaccaggatgactatgaggacggtgccatcacttccggcagcagcgtgaccttctccaactcctacggcagccagtggtcccccgactaccgctgctctgtggggacctacaacagctcgggtgcctaccggttcagctctgagggggcgcagtcctcgtttgaagatagtgaagaggactttgattccaggtttgatacagatgatgagctttcataccggcgtgactctgtgtacagctgtgtcactctgccgtatttccacagctttctgtacatgaaaggtggcctgatgaactcttggaaacgccgctggtgcgtcctcaaggatgaaaccttcttgtggttccgctccaagcaggaggccctcaagcaaggctggctccacaaaaaaggggggggctcctccacgctgtccaggagaaattggaagaagcgctggtttgtcctccgccagtccaagctgatgtactttgaaaacgacagcgaggagaagctcaagggcaccgtagaagtgcgaacggcaaaagagatcatagataacaccaccaaggagaatgggatcgacatcattatggccgataggactttccacctgattgcagagtccccagaagatgccagccagtggttcagcgtgctgagtcaggtccacgcgtccacggaccaggagatccaggagatgcatgatgagcaggcaaacccacagaatgctgtgggcaccttggatgtggggctgattgattctgtgtgtgcctctgacagccctgatagacccaactcgtttgtgatcatcacggccaaccgggtgctgcactgcaacgccgacacgccggaggagatgcaccactggataaccctgctgcagaggtccaaaggggacaccagagtggagggccaggaattcatcgtgagaggatggttgcacaaagaggtgaagaacagtccgaagatgtcttcactgaaactgaagaaacggtggtttgtactcacccacaattccctggattactacaagagttcagagaagaacgcgctcaaactggggaccctggtcctcaacagcctctgctctgtcgtccccccagatgagaagatattcaaagagacaggctactggaacgtcaccgtgtacgggcgcaagcactgttaccggctctacaccaagctgctcaacgaggccacccggtggtccagtgccattcaaaacgtgactgacaccaaggccccgatcgacacccccacccagcagctgattcaagatatcaaggagaactgcctgaactcggatgtggtggaacagatttacaagcggaacccgatccttcgatacacccatcaccccttgcactccccgctcctgccccttccgtatggggacataaatctcaacttgctcaaagacaaaggctataccacccttcaggatgaggccatcaagatattcaattccctgcagcaactggagtccatgtctgacccaattccaataatccagggcatcctacagacagggcatgacctgcgacctctgcgggacgagctgtactgccagcttatcaaacagaccaacaaagtgccccaccccggcagtgtgggcaacctgtacagctggcagatcctgacatgcctgagctgcaccttcctgccgagtcgagggattctcaagtatctcaagttccatctgaaaaggatacgggaacagtttccaggaaccgagatggaaaaatacgctctcttcacttacgaatctcttaagaaaaccaaatgccgagagtttgtgccttcccgagatgaaatagaagctctgatccacaggcaggaaatgacatccacggtctattgccatggcggcggctcctgcaagatcaccatcaactcccacaccactgctggggaggtggtggagaagctgatccgaggcctggccatggaggacagcaggaacatgtttgctttgtttgaatacaacggccacgtcgacaaagccattgaaagtcgaaccgtcgtagctgatgtcttagccaagtttgaaaagctggctgccacatccgaggttggggacctgccatggaaattctacttcaaactttactgcttcctggacacagacaacgtgccaaaagacagtgtggagtttgcatttatgtttgaacaggcccacgaagcggttatccatggccaccatccagccccggaagaaaacctccaggttcttgctgccctgcgactccagtatctgcagggggattatactctgcacgctgccatcccacctctcgaagaggtttattccctgcagagactcaaggcccgcatcagccagtcaaccaaaaccttcaccccttgtgaacggctggagaagaggcggacgagcttcctagaggggaccctgaggcggagcttccggacaggatccgtggtccggcagaaggtcgaggaggagcagatgctggacatgtggattaaggaagaagtctcctctgctcgagccagtatcattgacaagtggaggaaatttcagggaatgaaccaggaacaggccatggccaagtacatggccttgatcaaggagtggcctggctatggctcgacgctgtttgatgtggagtgcaaggaaggtggcttccctcaggaactctggttgggtgtcagcgcggacgccgtctccgtctacaagcgtggagagggaagaccactggaagtcttccagtatgaacacatcctctcttttggggcacccctggcgaatacgtataagatcgtggtcgatgagagggagctgctctttgaaaccagtgaggtggtggatgtggccaagctcatgaaagcctacatcagcatgatcgtgaagaagcgctacagcacgacacgctccgccagcagccagggcagctccaggtgaaggcgggacagagcccacctgtctttgctacctgaacgcaccaccctctggcctaggctggctccagtgtgccatgcccagccaaaacaaacacagagctgcccaggctttctggaagcttctggtctgagggaggtgtctccgaggatccttttgcctgccgccttcattgatcctgtattaagctgtcaactttaacagtctgcacagtttccaaagctttactactcttagaggacacatgccttaaaaaaggaggggaggaaccacgctgccaccaaagcagccggaagtgccttaacttgtggaaccaacactaatcgaccgtaactgtgctactgaagggaactgcctttcccccttctgggggagacttaacagagcgtggaaggggggcattctctgtcaatgatgcactaacctcccaacctgatttccccgaatctgagggaaggtgagggagtgggaagggggatggagagctcgaggggacagtgtgtttgagctggagtgctgcgggcagcctttctcatggaatgacatgaatcaacttttttctttgtttcatcttttaagtgtacgtgcttgcctgttcgtgcatgtgttcataaactcaacactttaatcatggtttcatgagcattaaaaagcaaagggaaaaaggatgtgtaatggtgtacacagtctgtatattttaataatgcagagctatagtctcaattgttactttataaggtggttttattaacaaacccaaatcctggattttcctgtctttgctgtattttgaaaaacacgtgttgactccattgttttacatgtagcaaagtctgccatctgtgtctgctgtattataaacagataagcagcctacaagataactgtatttataaaccactcttcaacagctggctccagtgctggttttagaacaagaatgaagtcattttggagtctttcatgtctaaaagatttaagttaaaaacaaagtgttacttggaaggttagcttctatcattctggatagattacagatataataaccatgttgactatgggggagagacgctgcattccagaaacgtcttaacacttgagtgaatcttcaaaggaccctgacattaaatgctgaggctttaatacacacatattttatcccaagtttataatggtggtctgaacaaggcacctgtaaataaatcagcatttatgaccagaagaaaaataatctggtcttggactttttatttttatatggaaaagttttaaggacttgggccaactaagtctacccacacgaaaaaagaaatttgccttgtccctttgtgtacaaccatgcaaaactgtttgttggctcacagaagttctgacaataaaagatactagct

SEQ ID NO: 55 - DNA, 3018 bp, Homo sapiens
gcacgagggaacaacctctctctctscagcagagagtgtcacctcctgctttaggaccatcaagctctgctaactgaatctcatcctaattgcaggatcacattgcaaagctttcactctttcccaccttgcttgtgggtaaatctcttctgcggaatctcagaaagtaaagttccatcctgagaatatttcacaaagaatttccttaagagctggactgggtcttgacccctggaatttaagaaattcttaaagacaatgtcaaatatgatccaagagaaaatgtgatttgagtctggagacaattgtgcatatcgtctaataataaaaacccatactagcctatagaaaacaatatttgaataataaaaacccatactagcctatagaaaacaatatttgaaagattgctaccactaaaaagaaaactactacaacttgacaagactgctgcaaacttcaattggtcaccacaacttgacaaggttgctataaaacaagattgctacaacttctagtttatgttatacagcatatttcatttgggcttaatgatggagaaaaagtgtaccctgtattttctggttctcttgcctttttttatgattcttgttacagcagaattagaagagagtcctgaggactcaattcagttgggagttactagaaataaaatcatgacagctcaatatgaatgttaccaaaagattatgcaagaccccattcaacaagcagaaggcgtttactgcaacagaacctgggatggatggctctgctggaacgatgttgcagcaggaactgaatcaatgcagctctgccctgattactttcaggactttgatccatcagaaaaagttacaaagatctgtgaccaagatggaaactggtttagacatccagcaagcaacagaacatggacaaattatacccagtgtaatgttaacacccacgagaaagtgaagactgcactaaatttgttttacctgaccataattggacacggattgtctattgcatcactgcttatctcgcttggcatattcttttatttcaagagcctaagttgccaaaggattaccttacacaaaaatctgttcttctcatttgtttgtaactctgttgtaacaatcattcacctcactgcagtggccaacaaccaggccttagtagccacaaatcctgttagttgcaaagtgtcccagttcattcatctttacctgatgggctgtaattacttttggatgctctgtgaaggcatttacctacacacactcattgtggtggccgtgtttgcagagaagcaacatttaatgtggtattattttcttggctggggatttccactgattcctgcttgtatacatgccattgctagaagcttatattacaatgacaattgctggatcagttctgatacccatctcctctacattatccatggcccaatttgtgctgctttactggtgaatctttttttcttgttaaatattgtacgcgttctcatcaccaagttaaaagttacacaccaagcggaatccaatctgtacatgaaagctgtgagagctactcttatcttggtgccattgcttggcattgaatttgtgctgattccatggcgacctgaaggaaagattgcagaggaggtatatgactacatcatgcacatccttatgcacttccagggtcttttggtctctaccattttctgcttctttaatggagaggttcaagcaattctgagaagaaactggaatcaatacaaaatccaatttggaaacagcttttccaactcagaagctcttcgtagtgcgtcttacacagtgtcaacaatcagtgatggtccaggttatagtcatgactgtcctagtgaacacttaaatggaaaaagcatccatgatattgaaaatgttctcttaaaaccagaaaatttatataattgaaaatagaaggatggttgtctcactgtttggtgcttctcctaactcaaggacttggacccatgactctgtagccagaagacttcaatattaaatgactttggggaatgtcataaagaagagccttcacatgaaattagtagtgtgttgataagagtgtaacatccagctctatgtgggaaaaaagaaatcctggtttgtaatgtttgtcagtaaatactcccactatgcctgatgtgacgctactaacctgacatcaccaagtgtggaattggagaaaagcacaatcaacttttctgagctggtgtaagccagttccagcacaccattgatgaattcaaacaaatggctgtaaaactaaacatacatgttgggcatgattctacccttattcsccccaagagacctagctaaggtctataaacatgaagggaaaattagcttttagttttaaaactctttatcccatcttgattggggcagttgactttttttttttcccagagtgccgtagtcctttttgtaactaccctctcaaatggacaataccagaagtgaattatccctgctggctttcttttctctatgaaaagcaactgagtacaattgttatgatctactcatttgctgacacatcagttatatcttgtggcatatccattgtggaaactggatgaacaggatgtataatatgcaatcttacttctatatcattaggaaaacatcttagttgatgctacaaaacaccttgtcaacctcttcctgtcttaccaaacagtgggagggaattcctagctgtaaatataaattttgcccttccatttctactgtataaacaaattagcaatcattttatataaagaaaatcaatgaaggatttcttattttcttggaattttgtaaaaagaaattgtgaaaaatgagcttgtaaatactccattattttattttatagtctcaaatcaaatacatacaacctatgtaatttttaaagcaaatatataatgcaacaatgtgtgtatgttaatatctgatactgtatctgggctgattttttaaataaaatagagtctggaatgct

SEQ ID NO: 56 - DNA, 1341 bp, Homo sapiens
acgcgtccgaagacattaagtaaaaaattggaactatgatttttctttgtcattttttaaaaaagaattattttattaacctgctggcatataatctggagttcttttcacaaccttactttttctgatttgctttattgaatgattgaatactcatttctttctaaaaatatgttgtaaattctcccttggcaagatttctccctatgagggtagttattatttgagtctgccaagtggttaccatggggcaaggtgccatgatgtattcttgggtgcattggttttttgcgcattgtaaatttaagacacttatagtaagtggactcattcatagatgagtttcagaaccttttacgttctcggtagaggcttctgtcggacaggcagaagagtgtattcctcacttttttttttgtcttcaaattccagtaaggcatagcacttttaagaaattagaatttttctatcatctatgcaaatgatatttatgttaatattaaatatcttatgttacactgggagtaatttgaggtgcaattatttttattactactttgaatagaggaccattatccttctttcttcagaaaactaagaagtaagtgtaacttttaaagtaagtatatatcagtgagagtaggcttgttttacaactatttctagccagtgagttgtgttttcatgtctcatcaaaagacaataccacattgcatcattttacaaaatatgttgtcattttcatttcagttgtaacataggaaaatagatatttcctagatgatttctgagtttcttactgcaaagaacagttataaattggtatacatgtgtctctgtaatagggataatattgatatatctgttgctacatatttaagaatcattctatcttatgttgtcttgaggccaagatttaccacgtttgcccagtgtattgaattggtggtagaaggtagttccatgttccatttgtagatctttaagattttatctttgataactttaatagaatgtggctcagttctggtccttcaagcctgtatggtttggattttcagtaggggacagttgatgtggagtcaatctctttggtacacaggaagctttataaaatttcattcacgaatctcttattttgggaagctgttttgcatatgagaagaacactgttgaaataaggaactaaagctttatatattgatcaaggtgattctgaaagttttaatttttaatgttgtaatgttatgttattgttaattgtactttattatgtattcaatagaaaatcatgatttattaataaaagcttaaattctcatctaaaaaaaaaaaaaaaaa

SEQ ID NO: 57 - DNA, 3834 bp, Homo sapiens
cctgagacagaggcagcagtgatacccacctgagagatcctgtgtttgaacaactgcttcccaaaacggaaagtatttcaagcctaaacctttgggtgaaaagaactcttgaagtcatgattgcttcacagtttctctcagctctcactttggtgcttctcattaaagagagtggagcctggtcttacaacacctccacggaagctatgacttatgatgaggccagtgcttattgtcagcaaaggtacacacacctggttgcaattcaaaacaaagaagagattgagtacctaaactccatattgagctattcaccaagttattactggattggaatcagaaaagtcaacaatgtgtgggtctgggtaggaacccagaaacctctgacagaagaagccaagaactgggctccaggtgaacccaacaataggcaaaaagatgaggactgcgtggagatctacatcaagagagaaaaagatgtgggcatgtggaatgatgagaggtgcagcaagaagaagcttgccctatgctacacagctgcctgtaccaatacatcctgcagtggccacggtgaatgtgtagagaccatcaataattacacttgcaagtgtgaccctggcttcagtggactcaagtgtgagcaaattgtgaactgtacagccctggaatcccctgagcatggaagcctggtttgcagtcacccactgggaaacttcagctacaattcttcctgctctatcagctgtgataggggttacctgccaagcagcatggagaccatgcagtgtatgtcctctggagaatggagtgctcctattccagcctgcaatgtggttgagtgtgatgctgtgacaaatccagccaatgggttcgtggaatgtttccaaaaccctggaagcttcccatggaacacaacctgtacatttgactgtgaagaaggatttgaactaatgggagcccagagccttcagtgtacctcatctgggaattgggacaacgagaagccaacgtgtaaagctgtgacatgcagggccgtccgccagcctcagaatggctctgtgaggtgcagccattcccctgctggagagttcaccttcaaatcatcctgcaacttcacctgtgaggaaggcttcatgttgcagggaccagcccaggttgaatgcaccactcaagggcagtggacacagcaaatcccagtttgtgaagctttccagtgcacagccttgtccaaccccgagcgaggctacatgaattgtcttcctagtgcttctggcagtttccgttatgggtccagctgtgagttctcctgtgagcagggttttgtgttgaagggatccaaaaggctccaatgtggccccacaggggagtgggacaacgagaagcccacatgtgaagctgtgagatgcgatgctgtccaccagcccccgaagggtttggtgaggtgtgctcattcccctattggagaattcacctacaagtcctcttgtgccttcagctgtgaggagggatttgaattatatggatcaactcaacttgagtgcacatctcagggacaatggacagaagaggttccttcctgccaagtggtaaaatgttcaagcctggcagttccgggaaagatcaacatgagctgcagtggggagcccgtgtttggcactgtgtgcaagttcgcctgtcctgaaggatggacgctcaatggctctgcagctcggacatgtggagccacaggacactggtctggcctgctacctacctgtgaagctcccactgagtccaacattcccttggtagctggactttctgctgctggactctccctcctgacattagcaccatttctcctctggcttcggaaatgcttacggaaagcaaagaaatttgttcctgccagcagctgccaaagccttgaatcagacggaagctaccaaaagccttcttacatcctttaagttcaaaagaatcagaaacaggtgcatctggggaactagagggatacactgaagttaacagagacagataactctcctcgggtctctggcccttcttgcctactatgccagatgcctttatggctgaaaccgcaacacccatcaccacttcaatagatcaaagtccagcaggcaaggacggccttcaactgaaaagactcagtgttccctttcctactctcaggatcaagaaagtgttggctaatgaagggaaaggatattttcttccaagcaaaggtgaagagaccaagactctgaaatctcagaattccttttctaactctcccttgctcgctgtaaaatcttggcacagaaacacaatattttgtggctttctttcttttgcccttcacagtgtttcgacagctgattacacagttgctgtcataagaatgaataataattatccagagtttagaggaaaaaaatgactaaaaatattataacttaaaaaaatgacagatgttgaatgcccacaggcaaatgcatggagggttgttaatggtgcaaatcctactgaatgctctgtgcgagggttactatgcacaatttaatcactttcatccctatgggattcagtgcttcttaaagagttcttaaggattgtgatatttttacttgcattgaatatattataatcttccatacttcttcattcaatacaagtgtggtagggacttaaaaaacttgtaaatgctgtcaactatgatatggtaaaagttacttattctagattaccccctcattgtttattaacaaattatgttacatctgttttaaatttatttcaaaaagggaaactattgtcccctagcaaggcatgatgttaaccagaataaagttctgagtgtttttactacagttgttttttgaaaacatggtagaattggagagtaaaaactgaatggaaggtttgtatattgtcagatattttttcagaaatatgtggtttccacgatgaaaaacttccatgaggccaaacgttttgaactaataaaagcataaatgcaaacacacaaaggtataattttatgaatgtctttgttggaaaagaatacagaaagatggatgtgctttgcattcctacaaagatgtttgtcagatgtgatatgtaaacataattcttgtatattatggaagattttaaattcacaatagaaactcaccatgtaaaagagtcatctggtagatttttaacgaatgaagatgtctaatagttattccctatttgttttcttctgtatgttagggtgctctggaagagaggaatgcctgtgtgagcaagcatttatgtttatttataagcagatttaacaattccaaaggaatctccagttttcagttgatcactggcaatgaaaaattctcagtcagtaattgccaaagctgctctagccttgaggagtgtgagaatcaaaactctcctacacttccattaacttagcatgtgttgaaaaaaaaagtttcagagaagttctggctgaacactggcaacgacaaagccaacagtcaaaacagagatgtgataaggatcagaacagcagaggttcttttaaaggggcagaaaaactctgggaaataagagagaacaactactgtgatcaggctatgtatggaatacagtgttattttctttgaaattgtttaagtgttgtaaatatttatgtaaactgcattagaaattagctgtgtgaaataccagtgtggtttgtgtttgagttttattgagaattttaaattataacttaaaatattttataatttttaaagtatatatttatttaagcttatgtcagacctatttgacataacactataaaggttgacaataaatgtgcttatgttt

SEQ ID NO: 58 - DNA, 1679 bp, Homo sapiens
gtttgttggctgcggcagcaggtagcaaagtgacgccgagggcctgagtgctccagtagccaccgcatctggagaaccagcggttaccatggaggggatcagtatatacacttcagataactacaccgaggaaatgggctcaggggactatgactccatgaaggaaccctgtttccgtgaagaaaatgctaatttcaataaaatcttcctgcccaccatctactccatcatcttcttaactggcattgtgggcaatggattggtcatcctggtcatgggttaccagaagaaactgagaagcatgacggacaagtacaggctgcacctgtcagtggccgacctcctctttgtcatcacgcttcccttctgggcagttgatgccgtggcaaactggtactttgggaacttcctatgcaaggcagtccatgtcatctacacagtcaacctctacagcagtgtcctcatcctggccttcatcagtctggaccgctacctggccatcgtccacgccaccaacagtcagaggccaaggaagctgttggctgaaaaggtggtctatgttggcgtctggatccctgccctcctgctgactattcccgacttcatctttgccaacgtcagtgaggcagatgacagatatatctgtgaccgcttctaccccaatgacttgtgggtggttgtgttccagtttcagcacatcatggttggccttatcctgcctggtattgtcatcctgtcctgctattgcattatcatctccaagctgtcacactccaagggccaccagaagcgcaaggccctcaagaccacagtcatcctcatcctggctttcttcgcctgttggctgccttactacattgggatcagcatcgactccttcatcctcctggaaatcatcaagcaagggtgtgagtttgagaacactgtgcacaagtggatttccatcaccgaggccctagctttcttccactgttgtctgaaccccatcctctatgctttccttggagccaaatttaaaacctctgcccagcacgcactcacctctgtgagcagagggtccagcctcaagatcctctccaaaggaaagcgaggtggacattcatctgtttccactgagtctgagtcttcaagttttcactccagctaacacagatgtaaaagacttttttttatacgataaataacttttttttaagttacacatttttcagatataaaagactgaccaatattgtacagtttttattgcttgttggatttttgtcttgtgtttctttagtttttgtgaagtttaattgacttatttatataaattttttttgtttcatattgatgtgtgtctaggcaggacctgtggccaagttcttagttgctgtatgtctcgtggtaggactgtagaaaagggaactgaacattccagagcgtgtagtgaatcacgtaaagctagaaatgatccccagctgtttatgcatagataatctctccattcccgtggaacgtttttcctgttcttaagacgtgattttgctgtagaagatggcacttataaccaaagcccaaagtggtatagaaatgctggtttttcagttttcaggagtgggttgatttcagcacctacagtgtacagtcttgtattaagttgttaataaaagtacatgttaaacttacttagtgttatg

SEQ ID NO: 59 - DNA, 2006 bp, Homo sapiens
cttcccaccagcaaagaccacgactggagagccgagccggaggcagctgggaaacatgaagagcgtcttgctgctgaccacgctcctcgtgcctgcacacctggtggccgcctggagcaataattatgcggtggactgccctcaacactgtgacagcagtgagtgcaaaagcagcccgcgctgcaagaggacagtgctcgacgactgtggctgctgccgagtgtgcgctgcagggcggggagaaacttgctaccgcacagtctcaggcatggatggcatgaagtgtggcccggggctgaggtgtcagccttctaatggggaggatccttttggtgaagagtttggtatctgcaaagactgtccctacggcaccttcgggatggattgcagagagacctgcaactgccagtcaggcatctgtgacagggggacgggaaaatgcctgaaattccccttcttccaatattcagtaaccaagtcttccaacagatttgtttctctcacggagcatgacatggcatctggagatggcaatattgtgagagaagaagttgtgaaagagaatgctgccgggtctcccgtaatgaggaaatggttaaatccacgctgatcccggctgtgatttctgagagaaggctctattttcgtgattgttcaacacacagccaacattttaggaactttctagatatagcataagtacatgtaatttttgaagatccaaattgtgatgcatggtggatccagaaaacaaaaagtaggatacttacaatccataacatccatatgactgaacacttgtatgtgtttgttaaatattcgaatgcatgtagatttgttaaatgtgtgtgtatagtaacactgaagaactaaaaatgcaatttaggtaatcttacatggagacaggtcaaccaaagagggagctaggcaaagctgaagaccgcagtgagtcaaattagttctttgactttgatgtacattaatgttgggatatggaatgaagacttaagagcaggagaagatggggagggggtgggagtgggaaataaaatatttagcccttccttggtaggtagcttctctagaatttaattgtgctttttttttttttttggctttgggaaaagtcaaaataaaacaaccagaaaacccctgaaggaagtaagatgtttgaagcttatggaaatttgagtaacaaacagctttgaactgagagcaatttcaaaaggctgctgatgtagttcccgggttacctgtatctgaaggacggttctggggcataggaaacacatacacttccataaatagctttaacgtatgccacctcagagataaatctaagaagtattttacccactggtggtttgtgtgtgtatgaaggtaaatatttatatatttttataaataaatgtgttagtgcaagtcatcttccctacccatatttatcatcctcttgaggaaagaaatctagtattatttgttgaaaatggttagaataaaaacctatgactctataaggttttcaaacatctgaggcatgataaatttattatccataattataggagtcactctggatttcaaaaaatgtcaaaaaatgagcaacagagggaccttatttaaacataagtgctgtgacttcggtgaattttcaatttaaggtatgaaaataagtttttaggaggtttgtaaaagaagaatcaattttcagcagaaaacatgtcaactttaaaatataggtggaattaggagtatatttgaaagaatcttagcacaaacaggactgttgtactagatgttcttaggaaatatctcagaagtattttatttgaagtgaagaacttatttaagaattatttcagtatttacctgtattttattcttgaagttggccaacagagttgtgaatgtgtgtggaaggcctttgaatgtaaagctgcataagctgttaggttttgttttaaaaggacatgtttattattgttcaataaaaaagaacaagatac

SEQ ID NO: 60 - DNA, 5510 bp, Homo sapiens
agccggccgtggtggctccgtgcgtccgagcgtccgtccgcgccgtcggccatggccaagcgctccaggggccccgggcgccgctgcctgttggcgctcgtgctgttctgcgcctgggggacgctggccgtggtggcccagaagccgggcgcagggtgtccgagccgctgcctgtgcttccgcaccaccgtgcgctgcatgcatctgctgctggaggccgtgcccgccgtggcgccgcagacctccatcctagatcttcgctttaacagaatcagagagatccaacctggggcattcaggcggctgaggaacttgaacacattgcttctcaataataatcagatcaagaggatacctagtggagcatttgaagacttggaaaatttaaaatatctctatctgtacaagaatgagatccagtcaattgacaggcaagcatttaagggacttgcctctctagagcaactatacctgcactttaatcagatagaaactttggacccagattcgttccagcatctcccgaagctcgagaggctatttttgcataacaaccggattacacatttagttccagggacatttaatcacttggaatctatgaagagattgcgactggactcaaacacacttcactgcgactgtgaaatcctgtggttggcggatttgctgaaaacctacgcggagtcggggaacgcgcaggcagcggccatctgtgaatatcccagacgcatccagggacgctcagtggcaaccatcaccccggaagagctgaactgtgaaaggccccggatcacctccgagccccaggacgcagatgtgacctcggggaacaccgtgtacttcacctgcagagccgaaggcaaccccaagcctgagatcatctggctgcgaaacaataatgagctgagcatgaagacagattcccgcctaaacttgctggacgatgggaccctgatgatccagaacacacaggagacagaccagggtatctaccagtgcatggcaaagaacgtggccggagaggtgaagacgcaagaggtgaccctcaggtacttcgggtctccagctcgacccacttttgtaatccagccacagaatacagaggtgctggttggggagagcgtcacgctggagtgcagcgccacaggccaccccccgccgcggatctcctggacgagaggtgaccgcacacccttgccagttgacccgcgggtgaacatcacgccttctggcgggctttacatacagaacgtcgtacagggggacagcggagagtatgcgtgctctgcgaccaacaacattgacagcgtccatgccaccgctttcatcatcgtccaggctcttcctcagttcactgtgacgcctcaggacagagtcgttattgagggccagaccgtggatttccagtgtgaagccaagggcaacccgccgcccgtcatcgcctggaccaagggagggagccagctctccgtggaccggcggcacctggtcctgtcatcgggaacacttagaatctctggtgttgccctccacgaccagggccagtacgaatgccaggctgtcaacatcatcggctcccagaaggtcgtggcccacctgactgtgcagcccagagtcaccccagtgtttgccagcattcccagcgacacaacagtggaggtgggcgccaatgtgcagctcccgtgcagctcccagggcgagcccgagccagccatcacctggaacaaggatggggttcaggtgacagaaagtggaaaatttcacatcagccctgaaggattcttgaccatcaatgacgttggccctgcagacgcaggtcgctatgagtgtgtggcccggaacaccattgggtcggcctcggtgagcatggtgctcagtgtgaacgttcctgacgtcagtcgaaatggagatccgtttgtagctacctccatcgtggaagcgattgcgactgttgacagagctataaactcaacccgaacacatttgtttgacagccgtcctcgttctccaaatgatttgctggccttgttccggtatccgagggatccttacacagttgaacaggcacgggcgggagaaatctttgaacggacattgcagctcattcaggagcatgtacagcatggcttgatggtcgacctcaacggaacaagttaccactacaacgacctggtgtctccacagtacctgaacctcatcgcaaacctgtcgggctgtaccgcccaccggcgcgtgaacaactgctcggacatgtgcttccaccagaagtaccggacgcacgacggcacctgtaacaacctgcagcaccccatgtggggcgcctcgctgaccgccttcgagcgcctgctgaaatccgtgtacgagaatggcttcaacacccctcggggcatcaacccccaccgactgtacaacgggcacgcccttcccatgccgcgcctggtgtccaccaccctgatcgggacggagaccgtcacacccgacgagcagttcacccacatgctgatgcagtggggccagttcctggaccacgacctcgactccacggtggtggccctgagccaggcacgcttctccgacggacagcactgcagcaacgtgtgcagcaacgaccccccctgcttctctgtcatgatcccccccaatgactcccgggccaggagcggggcccgctgcatgttcttcgtgcgctccagccctgtgtgcggcagcggcatgacttcgctgctcatgaactccgtgtacccgcgggagcagatcaaccagctcacctcctacatcgacgcatccaacgtgtacgggagcacggagcatgaggcccgcagcatccgcgacctggccagccaccgcggcctgctgcggcagggcatcgtgcagcggtccgggaagccgctgctccccttcgccaccgggccgcccacggagtgcatgcgggacgagaacgagagccccatcccctgcttcctggccggggaccaccgcgccaacgagcagctgggcctgaccagcatgcacacgctgtggttccgcgagcacaaccgcattgccacggagctgctcaagctgaacccgcactgggacggcgacaccatctactatgagaccaggaagatcgtgggtgcggagatccagcacatcacctaccagcactggctcccgaagatcctgggggaggtgggcatgaggacgctgggagagtaccacggctacgaccccggcatcaatgctggcatcttcaacgccttcgccaccgcggccttcaggtttggccacacgcttgtcaacccactgctttaccggctggacgagaacttccagcccattgcacaagatcacctcccccttcacaaagctttcttctctcccttccggattgtgaatgagggcggcatcgatccgcttctcagggggctgttcggggtggcggggaaaatgcgtgtgccctcgcagctgctgaacacggagctcacggagcggctgttctccatggcacacacggtggctctggacctggcggccatcaacatccagcggggccgggaccacgggatcccaccctaccacgactacagggtctactgcaatctatcggcggcacacacgttcgaggacctgaaaaatgagattaaaaaccctgagatccgggagaaactgaaaaggttgtatggctcgacactcaacatcgacctgtttccggcgctcgtggtggaggacctggtgcctggcagccggctgggccccaccctgatgtgtcttctcagcacacagttcaagcgcctgcgagatggggacaggttgtggtatgagaaccctggggtgttctccccggcccagctgactcagatcaagcagacgtcgctggccaggatcctatgcgacaacgcggacaacatcacccgggtgcagagcgacgtgttcagggtggcggagttccctcacggctacggcagctgtgacgagatccccagggtggacctccgggtgtggcaggactgctgtgaagactgtaggaccagggggcagttcaatgccttttcctatcatttccgaggcagacggtctcttgagttcagctaccaggaggacaagccgaccaagaaaacaagaccacggaaaatacccagtgttgggagacagggggaacatctcagcaacagcacctcagccttcagcacacgctcagatgcatctgggacaaatgacttcagagagtttgttctggaaatgcagaagaccatcacagacctcagaacacagataaagaaacttgaatcacggctcagtaccacagagtgcgtggatgccgggggcgaatctcacgccaacaacaccaagtggaaaaaagatgcatgcaccatttgtgaatgcaaagacgggcaggtcacctgcttcgtggaagcttgcccccctgccacctgtgctgtccccgtgaacatcccaggggcctgctgtccagtctgcttacagaagagggcggaggaaaagccctaggctcctgggaggctcctcagagtttgtctgctgtgccatcgtgagatcgggtggccgatggcagggagctgcggactgcagaccaggaaacacccagaactcgtgacatttcatgacaacgtccagctggtgctgttacagaaggcagtgcaggaggcttccaaccagagcatctgcggagaaggaggcacagcaggtgcctgaagggaagcaggcaggagtcctagcttcacgttagacttctcaggtttttatttaattcttttaaaatgaaaaattggtgctactattaaattgcacagttgaatcatttaggcgcctaaattggttttgcctcccaacaccatttctttttaaataaagcaggatacctctatatgtcagccttgccttgttcagatgccaggagccggcagacctgtcacccgcaggtggggtgagtctcggagctgccagaggggctcaccgaaatcggggttccatcacaagctatgtttaaaaagaaaattggtgtttggcaaacggaacagaacctttgatgagagcgttcacagggacactgtctgggggtgcagtgcaagcccccggcctcttccctgggaacctctgaactcctccttcctctgggctctctgtaacatttcaccacacgtcagcatctaatcccaagacaaacattcccgctgctcgaagcagctgtatagcctgtgactctccgtgtgtcagctccttccacacctgattagaacattcataagccacatttagaaacagatttgctttcagctgtcacttgcacacatactgcctagttgtgaaccaaatgtgaaaaaacctccttcatcccattgtgtatctgatacctgccgagggccaagggtgtgtgttgacaacgccgctcccagccggccctggttgcgtccacgtcctgaacaagagccgcttccggatggctcttcccaagggaggaggagctcaagtgtcgggaactgtctaacttcaggttgtgtgagtgcgtt

SEQ ID NO: 61 - DNA, 3864 bp, Homo sapiens
aattcgaggatccgggtaccatggcacagagcgacagagacatttattgttatttgttttttggtggcaaaaagggaaaatggcgaacgactcccctgcaaaaagtctggtggacatcgacctctcctccctgcgggatcctgctgggatttttgagctggtggaagtggttggaaatggcacctatggacaagtctataagggtcgacatgttaaaacgggtcagttggcagccatcaaagttatggatgtcactgaggatgaagaggaagaaatcaaactggagataaatatgctaaagaaatactctcatcacagaaacattgcaacatattatggtgctttcatcaaaaagagccctccaggacatgatgaccaactctggcttgttatggagttctgtggggctgggtccattacagaccttgtgaagaacaccaaagggaacacactcaaagaagactggatcgcttacatctccagagaaatcctgaggggactggcacatcttcacattcatcatgtgattcaccgggatatcaagggccagaatgtgttgctgactgagaatgcagaggtgaaacttgttgactttggtgtgagtgctcagctggacaggactgtggggcggagaaatacgttcataggcactccctactggatggctcctgaggtcatcgcctgtgatgagaacccagatgccacctatgattacagaagtgatctttggtcttgtggcattacagccattgagatggcagaaggtgctccccctctctgtgacatgcatccaatgagagcactgtttctcattcccagaaaccctcctccccggctgaagtcaaaaaaatggtcgaagaagttttttagttttatagaagggtgcctggtgaagaattacatgcagcggccctctacagagcagcttttgaaacatccttttataagggatcagccaaatgaaaggcaagttagaatccagcttaaggatcatatagatcgtaccaggaagaagagaggcgagaaagatgaaactgagtatgagtacagtgggagtgaggaagaagaggaggaagtgcctgaacaggaaggagagccaagttccattgtgaacgtgcctggtgagtctactcttcgccgagatttcctgagactgcagcaggagaacaaggaacgttccgaggctcttcggagacaacagttactacaggagcaacagctccgggagcaggaagaatataaaaggcaactgctggcagagagacagaagcggattgagcagcagaaagaacagaggcgacggctagaagagcaacaaaggagagagcgggaggctagaaggcagcaggaacgtgaacagcgaaggagagaacaagaagaaaagaggcgtctagaggagttggagagaaggcgcaaagaagaagaggagaggagacgggcagaagaagaaaagaggagagttgaaagagaacaggagtatatcaggcgacagctagaagaggagcagcggcacttggaagtccttcagcagcagctgctccaggagcaggccatgttactgcatgaccataggaggccgcacccgcagcactcgcagcagccgccaccaccgcagcaggaaaggagcaagccaagcttccatgctcccgagcccaaagcccactacgagcctgctgaccgagcgcgagaggttcctgtgagaacaacatctcgctcccctgttctgtcccgtcgagattccccactgcagggcagtgggcagcagaatagccaggcaggacagagaaactccaccagtattgagcccaggcttctgtgggagagagtggagaagctggtgcccagacctggcagtggcagctcctcagggtccagcaactcaggatcccagcccgggtctcaccctgggtctcagagtggctccggggaacgcttcagagtgagatcatcatccaagtctgaaggctctccatctcagcgcctggaaaatgcagtgaaaaaacctgaagataaaaaggaagttttcagacccctcaagcctgctggcgaagtggatctgaccgcactggccaaagagcttcgagcagtggaagatgtacggccacctcacaaagtaacggactactcctcatccagtgaggagtcggggacgacggatgaggaggacgacgatgtggagcaggaaggggctgacgagtccacctcaggaccagaggacaccagagcagcgtcatctctgaatttgagcaatggtgaaacggaatctgtgaaaaccatgattgtccatgatgatgtagaaagtgagccggccatgaccccatccaaggagggcactctaatcgtccgccagactcagtccgctagtagcacactccagaaacacaaatcttcctcctcctttacaccttttatagaccccagattactacagatttctccatctagcggaacaacagtgacatctgtggtgggattttcctgtgatgggatgagaccagaagccataaggcaagatcctacccggaaaggctcagtggtcaatgtgaatcctaccaacactaggccacagagtgacaccccggagattcgtaaatacaagaagaggtttaactctgagattctgtgtgctgccttatggggagtgaatttgctagtgggtacagagagtggcctgatgctgctggacagaagtggccaagggaaggtctatcctcttatcaaccgaagacgatttcaacaaatggacgtacttgagggcttgaatgtcttggtgacaatatctggcaaaaaggataagttacgtgtctactatttgtcctggttaagaaataaaatacttcacaatgatccagaagttgagaagaagcagggatggacaaccgtaggggatttggaaggatgtgtacattataaagttgtaaaatatgaaagaatcaaatttctggtgattgctttgaagagttctgtggaagtctatgcgtgggcaccaaagccatatcacaaatttatggcctttaagtcatttggagaattggtacataagccattactggtggatctcactgttgaggaaggccagaggttgaaagtgatctatggatcctgtgctggattccatgctgttgatgtggattcaggatcagtctatgacatttatctaccaacacatgtaagaaagaacccacactctatgatccagtgtagcatcaaaccccatgcaatcatcatcctccccaatacagatggaatggagcttctggtgtgctatgaagatgagggggtttatgtaaacacatatggaaggatcaccaaggatgtagttctacagtggggagagatgcctacatcagtagcatatattcgatccaatcagacaatgggctggggagagaaggccatagagatccgatctgtggaaactggtcacttggatggtgtgttcatgcacaaaagggctcaaagactaaaattcttgtgtgaacgcaatgacaaggtgttctttgcctctgttcggtctggtggcagcagtcaggtttatttcatgaccttaggcaggacttctcttctgagctggtagaagcagtgtgatccagggattactggcctccagagtcttcaagatcctgagaacttggaattccttgtaactggagctcggagctgcaccgagggcaaccaggacagctgtgtgtgcagacctcatgtgttgggttctctcccctccttcctgttcctcttatataccagtttatccccattctttttttttttcttactccaaaataaatcaaggctgcaatgcagctggtgctgttcagattccaaaaaaaaaaaaaaaccatggtacccggatcctcgaattcc

SEQ ID NO: 62 - DNA, 2494 bp, Homo sapiens
cacgaggcaggggccattttacctccaggttggccctgctcaggaccaggaggaaacacctccagcccgcgacctcctcccacagggggaaaaggaaagcaggaggaccacagaagctttggcaccgaggatccccgcagtcttcacccgcggagattccggctgaaggagctgtccagcgactacaccgctaagcgcagggagcccaagcctccgcaccggattccggagcacaagctccaccgcgcatgcgcacacgccccagacccaggctcaggaggactgagaattttctgaccgcagtgcaccatgggaagctctgaagtttccataattcctgggctccagaaagaagaaaaggcggccgtggagagacgaagacttcatgtgctgaaagctctgaagaagctaaggattgaggctgatgaggccccagttgttgctgtgctgggctcaggcggaggactgcgggctcacattgcctgccttggggtcctgagtgagatgaaagaacagggcctgttggatgccgtcacgtacctcgcaggggtctctggatccacttgggcaatatcttctctctacaccaatgatggtgacatggaagctctcgaggctgacctgaaacatcgatttacccgacaggagtgggacttggctaagagcctacagaaaaccatccaagcagcgaggtctgagaattactctctgaccgacttctgggcctacatggttatctctaagcaaaccagagaactgccggagtctcatttgtccaatatgaagaagcccgtggaagaagggacactaccctacccaatatttgcagccattgacaatgacctgcaaccttcctggcaggaggcaagagcaccagagacctggttcgagttcacccctcaccacgctggcttctctgcactgggggcctttgtttccataacccacttcggaagcaaattcaagaagggaagactggtcagaactcaccctgagagagacctgactttcctgagaggtttatggggaagtgctcttggtaacactgaagtcattagggaatacatttttgaccagttaaggaatctgaccctgaaaggtttatggagaagggctgttgctaatgctaaaagcattggacaccttatttttgcccgattactgaggctgcaagaaagttcacaaggggaacatcctcccccagaagatgaaggcggtgagcctgaacacacctggctgactgagatgctcgagaattggaccaggacctccctggaaaagcaggagcagccccatgaggaccccgaaaggaaaggctcactcagtaacttgatggattttgtgaagaaaacaggcatttgcgcttcaaagtgggaatgggggaccactcacaacttcctgtacaaacacggtggcatccgggacaagataatgagcagccggaagcacctccacctggtggatgctggtttagccatcaacactcccttcccactcgtgctgcccccgacgcgggaggttcacctcatcctctccttcgacttcagtgccggagatcctttcgagaccatccgggctaccactgactactgccgccgccacaagatcccctttccccaagtagaagaggctgagctggatttgtggtccaaggcccccgccagctgctacatcctgaaaggagaaactggaccagtggtgatacattttcccctgttcaacatagatgcctgtggaggtgatattgaggcatggagtgacacatacgacacattcaagcttgctgacacctacactctagatgtggtggtgctactcttggcattagccaagaagaatgtcagggaaaacaagaagaagatccttagagagttgatgaacgtggccgggctctactacccgaaggatagtgcccgaagttgctgcttggcatagatgagcctcagcttccagggcactgtgggcctgttggtctactagggccctgaagtccacctggccttcctgttcttcactcccttcagccacacgcttcatggccttgagttcaccttggctgtcctaacagggccaatcaccagtgaccagctagactgtgattttgatagcgtcattcagaagaaggtgtccaaggagctgaaggtggtgaaatttgtcctgcaggtccctcgggagatcctggagctggagcatgagtgtctgacaatcagaagcatcatgtccaatgtccagatggccagaatgaatgtgatagttcagaccaatgccttccactgctcctttatgactgcacttctagccagtagctctgcacaagttagctctgtagaagtaagaacttgggcttaaatcatgggctatctctccacagccaagtggagctctgagaatacaacaagtgctcaataaatgcttgctgattgactgatgaaaaaaaaaaaaaaaaaaaaaaaaaaaaaaaaaaaaaaaaaaaaaaaaaaaaaaaaaaaaaaaa

SEQ ID NO: 63 - DNA, 2415 bp, Homo sapiens
ggggagggcgcgggaggcggaggatgccgccgcggctgctgccgccgccgccacccgcgggtccccggcgaccctactccagacccgaggatggagccggcgctgggcgctgcagctgctcccggcgcgtccccgaccaggtagctggtgtcacttcggtgtggttggaagaagactttctccccagctgcattcccggaggcgccctttcgacctggaggccgggtctgctggccacagggctgccgcactggctgggactgccagctgggcctggagacgctggtggctgtggactccccagcttggagcagtccctctttgacctcaccccttggagaagcagccccatgaaggtgcccagccatgcaatgttcctggaaggccgtcctcctccttgccctggcctccattgccatccagtacacggccatccgcaccttcaccgccaagtcctttcacacctgccccgggctggcagaggccgggctggccgagcgactgtgcgaggagagccccaccttcgcctacaacctctcccgcaagacccacatcctcatcctggccaccacgcgcagcggctcctccttcgtgggccagctcttcaaccagcacctggacgtcttctacctgtttgagcccctctaccacgtccagaacacgctcatcccccgcttcacccagggcaagagcccggccgaccggcgggtcatgctaggcgccagccgcgacctcctgcggagcctctacgactgcgacctctacttcctggagaactacatcaagccgccgccggtcaaccacaccaccgacaggatcttccgccgcggggccagccgggtcctctgctcccggcctgtgtgcgaccctccggggccagccgacctggtcctggaggagggggactgtgtgcgcaagtgcgggctactcaacctgaccgtggcggccgaggcgtgccgcgagcgcagccacgtggccatcaagacggtgcgcgtgcccgaggtgaacgacctgcgcgccctggtggaagacccgcgattaaacctcaaggtcatccagctggtccgagacccccgcggcattctggcttcgcgcagcgagaccttccgcgacacgtaccggctctggcggctctggtacggcaccgggaggaaaccctacaacctggacgtgacgcagctgaccacggtgtgcgaggacttctccaactccgtgtccaccggcctcatgcggcccccgtggctcaagggcaagtacatgttggtgcgctacgaggacctggctcggaaccctatgaagaagaccgaggagatctacgggttcctgggcatcccgctggacagccacgtggcccgctggatccagaacaacacgcggggcgaccccaccctgggcaagcacaaatacggcaccgtgcgaaactcggcggccacggccgagaagtggcgcttccgcctctcctacgacatcgtggcctttgcccagaacgcctgccagcaggtgctggcccagctgggctacaagatcgccgcctcggaggaggagctgaagaacccctcggtcagcctggtggaggagcgggacttccgccccttctcgtgacccgggcggtgcgggtgggggcgggaggcgcaaggtgtcggttttgataaaatggaccgtttttaactgttgccttattaacccctccctctcccacctcatcttcgtgtccttcctgcccccagctcaccccactcccttctgccccttttttgtctctgaaatttgcactacgtcttggacgggaatcactggggcagagggcgcctgaagtagggtcccgccccccccaccccattcagacacatggatgttgggtctctgtgcggacggtgacaatgtttacaagcaccacatttacacatccacacacgcacacgggcactcgcgaggcgacttctcaagcttttgaatgggtgagtggtcgggtatctagtttttgcactgtcttactattcaaggtaagaggatacaaacaagaggaccacttgtctctaatttatgaatggtgtccatcctttccccatccctgcctcctgcccctgacgcccatttccccccttagagcagcgaaactgccccctcctgcccgcccttgcctgtcggtgaggcaggtttttactgtgaggtgaacgtggacctgtttctgtttccagtctgtggtgatgctgtctgtctgtctgagtctcgtggccgcccctggaccagtgatgactgatgaatcttatgagcttctgattgatctcggggtccatctgtgatatttctttgtgccaaaaagaaaaaaaaagagtggatcagtttgctaaatgaacattgaaattgaaatgctttatctgtgttttctgtaaataaaagagtgcaataatcacc

SEQ ID NO: 64 - DNA, 4198 bp, Homo sapiens
ctgctatcaaaaaggccataaggattttgtccccaaatttcacatgagctaccttgcttcaaactactgagatgaagggggcaagattatttgtccttctttctagtttatggagtgggggcattgggcttaacaacagtaagcattcttggactatacctgaggatgggaactctcagaagactatgccttctgcttcagttcctccaaataaaatacaaagtttgcaaatactgccaaccactcgggtcatgtcggcggagatagctacaactccagaggcaagaacttctgaagacagtcttcttaaatcaacactgcctccctcagaaacaagtgcacctgctgagggtgtgagaaatcaaactctcacatccacagagaaagcagaaggagtggtcaagttacagaatcttaccctcccaaccaacgctagcatcaagttcaatcctggagcagaatcagtggtcctttccaattctacactgaaatttcttcagagctttgccagaaagtcaaatgaacaagcaacttctctaaacacagttggaggcactggaggcattggaggcgttggaggcactggaggcgtgggaaatcgagccccacgggaaacatacctcagccggggtgacagcagttccagccaaagaactgactaccaaaaatcaaatttcgaaacaactagaggaaagaattggtgtgcttatgtacataccaggttatctcccacagtgacattggacaaccaggtcacttatgtcccaggtgggaaaggaccttgtggctggaccggtggatcctgtcctcagagatctcagaagatatccaatcctgtctataggatgcaacataaaattgtcacctcattggattggaggtgctgtcctggatacagtgggccgaaatgtcaactaagagcccaggaacagcaaagtttgatacacaccaaccaggctgaaagtcatacagctgttggcagaggagtagctgagcagcagcagcagcaaggctgtggtgacccagaagtgatgcaaaaaatgactgatcaggtgaactaccaggcaatgaaactgactcttctgcagaagaagattgacaatatttctttgactgtgaatgatgtaaggaacacttactcctccctagaaggaaaagtcagcgaagataaaagcagagaatttcaatctcttctaaaaggtctaaaatccaaaagcattaatgtactgataagagacatagtaagagaacaatttaaaatttttcaaaatgacatgcaagagactgtagcacagctcttcaagactgtatcaagtctatcagaggacctcgaaagcaccaggcaaataattcaaaaagttaatgaatctgtggtttcaatagcagcccagcaaaagtttgttttggtgcaagagaatcggcccactttgactgatatagtggaactaaggaatcacattgtgaatgtaaggcaagaaatgactcttacatgtgagaagcctattaaagaactagaagtaaagcagactcatttagaaggtgctctagaacaggaacactcaagaagcattctgtattatgaatccctcaataaaactctttctaaattgaaggaagtacatgagcagcttttatcaactgaacaggtatcagaccagaagaatgctccagctgctgagtcagttagcaataatgtcactgagtacatgtctactttacatgaaaatataaagaagcagagtttgatgatgctgcaaatgtttgaagatttgcacattcaagaaagcaagattaacaatctcaccgtctctttggagatggagaaagagtctctcagaggtgaatgtgaagacatgttatccaaatgcagaaatgattttaaatttcaacttaaggacacagaagagaatttacatgtgttaaatcaaacattggctgaagttctctttccaatggacaataagatggacaaaatgagtgagcaactaaatgatttgacttatgatatggagatccttcaacccttgcttgagcagggagcatcactcagacagacaatgacatatgaacaaccaaaggaagcaatagtgataaggaaaaagatagaaaatctgactagtgctgtcaatagtctaaattttattatcaaagaacttacaaaaagacacaacttacttagaaatgaagtacagggtcgtgatgatgccttagaaagacgtatcaatgaatatgccttagaaatggaagatggcctcaataagacaatgactattataaataatgctattgatttcattcaagataactatgccctaaaagagactttaagtactattaaggataatagtgagatccatcataaatgtacctccgatatggaaactattttgacatttattcctcagttccaccgtctgaatgattctattcagactttggtcaatgacaatcagagatataactttgttttgcaagtcgccaagacccttgcaggtattcccagagatgagaaactaaatcagtccaacttccaaaagatgtatcaaatgttcaatgaaaccacttcccaagtgagaaaataccagcaaaatatgagtcatttggaagaaaaactactcttaactaccaagatttccaaaaattttgagactcggttgcaagacattgagtctaaagttacccagacgctcataccttattatatttcagttaaaaaaggcagtgtagttacaaatgagagagatcaggctcttcaactgcaagtattaaattccagatttaaggcgttggaagcaaaatctatccatctttcaattaacttcttttcgcttaacaaaactctccacgaagttttaacaatgtgtcacaatgcttctacaagtgtgtcagaactgaatgctaccatccctaagtggataaaacattccctgccagatattcaacttcttcagaaaggtctaacagaatttgtggaaccaataattcaaataaaaactcaagctgccctatctaattcaacttgttgtatagatcgatcgttgcctggtagtctggcaaatgttgtcaagtctcagaagcaagtaaaatcattgccaaagaaaattaacgcacttaagaaaccaacggtaaatcttaccacagtcctgataggccggactcaaagaaacacggacaacataatatatcctgaggagtattcaagctgtagtcggcatccgtgccaaaatgggggcacgtgcataaatggaagaactagctttacctgtgcctgcagacatccttttactggtgacaactgcactatcaagcttgtggaagaaaatgctttagctccagatttttccaaaggatcttacagatatgcacccatggtggcattttttgcatctcatacgtatggaatgactatacctggtcctatcctgtttaataacttggatgtcaattatggagcttcatataccccaagaactggaaaatttagaattccgtatcttggagtatatgttttcaagtacaccatcgagtcatttagtgctcatatttctggatttttagtggttgatggaatagacaagcttgcatttgagtctgaaaatattaacagtgaaatacactgtgatagggttttaactggggatgccttattagaattaaattatgggcaggaagtctggttacgacttgcaaaaggaacaattccagccaagtttccccctgttactacatttagtggctatttattatatcgtacataagttagtatgaaaaacagactatcacctttattgagaaacagccagtgttttcatttatctttgcttgcacatctgctctgttttggtttttctacaggaaatgaaaatcaacttgtttttttaatatgagtaaacttgtatgtctattttataaaattatttgaatattgtttaatgtctgaatatgaaagagttcttgatcctaaagaaatttagtggcacagaaaacaaagtgaatttgttagcataattattcctattcttatttcttcattttaagtcattgcaatggaaagtaatattataaaacggtaattacaacatattatcagtcacagttttctttccaattaaacacttaacttttgttattccctgtatataaatatataacacacattttctagattcacaaatttaaataaattactcaaaaaatg

SEQ ID NO: 65 - DNA, 1664 bp, Homo sapiens
gtcgccgcgcggccgccggtgagccgcatggagccccgggcggcggacggctgcttcctgggcgacgtgggtttctgggtggagcggacccctgtgcacgaggcagcccagcggggtgagagcctgcagctgcaacagctgatcgagagcggcgcctgcgtgaaccaggtcaccgtggactccatcacgcccctgcacgcagccagtctgcagggccaggcgcggtgtgtgcagctgctgctggcggctggggcccaggtggatgctcgcaacatcgacggcagcaccccgctctgcgatgcctgcgcctcgggcagcatcgagtgtgtgaagctcttgctgtcctacggggccaaggtcaaccctcccctgtacacagcgtcccccctgcacgaggccagctttccccgcctcctgagcaccctggcttcgacgccctggatcaactgagccaggtggaactcctgggggacatggatcgcaatgaattcgaccagtatttgaacactcctggccacccagactccgccacaggggccatggccctcagtgggcatgttccggtctcccaggtgacaccaacgggtcccacagagaccagcctcatctccgtcctggctgatgccacggccacgtactacaacagctacagtgtgtcatagagctggaggcgccccgtccggtcagccctcgcgccctctccttcttgtgccttgagtggcagaggagccgtccagccacaccagctttcctcccaccgctcagggcagggaggtctgaactgcggccccagagcctttggcctaagctggactctccttatccgagtgccgcctctatccccttccccacgttccagcccctgcagcccacattttaagtatattccttcaagtgagttttcctccagcccctgagagttgctgtctcccagtggaatgttcactgacgtcttttcttggtagccatcatcgaaactaatggggggacagacttgatagccaaggtcccttctggtccagttttctgatttagggttctctcaagattaataaaggaagatggggaaatttgactcattaatgagctcgctaacctacgatctggtgataattttgtgtgcacagcccaaggaccacgaggctttctgcactttctgcacccccttccaaagtgaccacaaaatttcaaagggactcatacaatttgagaaaaaacagtcaacctgatttgagaaattaaccagtatggctaactatatcacagaaaatgggattgagttaaaactattttattttaaatatacattttaaagcagttcttttttttttgttaatttgtttattatacacacacttcaagagaatatgcacagtctaggccgggcacggtggctcacgcctgtaatcccagcactttgggaggccgaggcatgtggatcacctgaggtcaggagtttgagaccagcctagacaacatggtgaaaccttgtctctatgaaaaatacaaaatttgctgggagtggtggtgcatgcctgtaatcccagctacttggaaggctgaggcaggagaatgtcttgaacctaggaggtggaggttgcagtgagctgagattgcaccattgcactccagcctgtgcaacaagagtgaaactccatttcaag

SEQ ID NO: 66 - DNA, 2521 bp, Homo sapiens
atggctgcaaataagcccaagggtcagaattctttggctttacacaaagtcatcatggtgggcagtggtggcgtgggcaagtcagctctgactctacagttcatgtacgatgagtttgtggaggactatgagcctaccaaagcagacagctatcggaagaaggtagtgctagatggggaggaagtccagatcgatatcttagatacagctgggcaggaggactacgctgcaattagagacaactacttccgaagtggggaggggttcctctgtgttttctctattacagaaatggaatcctttgcagctacagctgacttcagggagcagattttaagagtaaaagaagatgagaatgttccatttctactggttggtaacaaatcagatttagaagataaaagacaggtttctgtagaagaggcaaaaaacagagctgagcagtggaatgttaactacgtggaaacatctgctaaaacacgagctaatgttgacaaggtattttttgatttaatgagagaaattcgagcgagaaagatggaagacagcaaagaaaagaatggaaaaaagaagaggaaaagtttagccaagagaatcagagaaagatgctgcattttataatcaaagcccaaactcctttcttatcttgaccatactaataaatataatttataagcattgccattgaaggcttaattgactgaaattactttaacattttggaaattgttgtatatcactaaaagcatgaattggaactgcaatgaaagtcaaatttactttaaaaagaaattaatatggcttcaccaagaagcaaagttcaacttatttcataattgcctacatttatcatggtcctgaatgtagcgtgtaagcttgtgtttcttgggcagtctttcttgaaattgaagaggtgaaatgggggtggggagtgggaggaaaggtgacttcctctggtgtttattataaagcttaaattttatatcattttaaaatgtcttggtcttctactgccttgaaaaatgacaattgtgaacatgatagttaaactaccactttttttaaccattattatgcaaaatttagaagaaaagttattggcatggttgttgcatatagttaaactgagagtaattcatctgtgaatctgctttaattacctggtgagtaacttagaaaagtggtgtaaacttgtacatggaattttttgaatatgccttaatttagaaactgaaaaatatccggttatatcattctgggtgtgttcttactgacaccaggggtccgctgccccatgtgtcctggtgagaaaatatatgcctggcacagcttttgtatagaaaattcttgagaagtaactgtccgctagaagtctgtccaaatttaaaatgtgtgccatattctggttcttgaaaataagattccagagctctttgatcgcttttaataaactgcaagttcattttaattgaagggccagcatatatacttgcaagataattttcagctgcaaggattcagcaccagttatgtttgaatgaaccctccttttctctgagattctggtccctggaaatccctttctgctagtggtgagcatgtaagtgttaagtttttaatctgggagcagggcataggaagaaaatgtcagtagtgctaatgcattttgcactagaacgcttcgggaaaatattcatgcttgccatctgttcatttctaaatttatattcataaagttacagtttgatacaggaattattaggagtaattcttttctgtttctgtttataatgaagaacactgtagctacattttcagaagttaacatcaagccatcaaacctgggtatagtgcagaagacgtggcacacactgaccacacattaggctgtgtcaccattgtgtggtgtacctgctggaagaattctagcatgctacttggggacataatttcagtgggaaatatgccactgaccgatttttttttttttcctctttgcagtggggctaggacagttgattcaacaaagtatttttttcttttttctcagtcctaatttggacaggtcaaagatgtgttcaggcattccaggtaacaggtgtgtatgtaaagttaaaaataggctttttaggaactcactctttagatatttacatccagcttctcatgttaaatatttgtccttaaagggtttgagatgtacatctttcatttcgtatttctcataggctatgccatgtgcggaattcaagttaccaatgtaacactggccagcgggcccagcaatctccatgtgtacttattacagtcttatttaaccaggggtcctaaccactaacattgtgactttgctttgagacctttcctctcctgggtactgaggtgctatgaagccaactgacaaagatgcatcacgtgtcttaggctgatgccactacccgatttgtttatttgcaatttgagccatttaaagaccaataaacttccttttttaaaaaaaaaaaaaaaaaaaaaaaaaaaa

SEQ ID NO: 67 - DNA, 5059 bp, Homo sapiens
ctggttctcaacttcttttgaaataatgttcatagagaaggagggctgtctgagattcgagggaaacaagctctcaggacttccggtcgccatgatggctgtgggcggtaaacgcggttagtgcaagcatctgggccatcttcaatggtaaaaaagatacagtaaagacataaataccacatttgacaaatggaaaaaaaggagtgtccagaaaagagtagcagcagtgaggaagagctgccgagacgggtatacagggagctaccctgtgtttctgagaccctttgtgacatctcacattttttccaagaagatgatgagacagaggcagagccattattgttccgtgctgttcctgagtgtcaactatctgggggggacattcccaggagacatttgctcagaagagaatcaaatagtttcctcttatgcttctaaagtctgttttgagatcgaagaagattataaaaatcgtcagtttctggggcctgaaggaaatgtggatgttgagttgattgataagagcacaaacagatacagcgtttggttccccactgctggctggtatctgtggtcagccacaggcctcggcttcctggtaagggatgaggtcacagtgacgattgcgtttggttcctggagtcagcacctggccctggacctgcagcaccatgaacagtggctggtgggcggccccttgtttgatgtcactgcagagccagaggaggctgtcgccgaaatccacctcccccacttcatctccctccaaggtgaggtggacgtctcctggtttctcgttgcccattttaagaatgaagggatggtcctggagcatccagcccgggtggagcctttctatgctgtcctggaaagccccagcttctctctgatgggcatcctgctgcggatcgccagtgggactcgcctctccatccccatcacttccaacacattgatctattatcacccccaccccgaagatattaagttccacttgtaccttgtccccagcgacgccttgctaacaaaggcgatagatgatgaggaagatcgcttccatggtgtgcgcctgcagacttcgcccccaatggaacccctgaactttggttccagttatattgtgtctaattctgctaacctgaaagtaatgcccaaggagttgaaattgtcctacaggagccctggagaaattcagcacttctcaaaattctatgctgggcagatgaaggaacccattcaacttgagattactgaaaaaagacatgggactttggtgtgggatactgaggtgaagccagtggatctccagcttgtagctgcatcagcccctcctcctttctcaggtgcagcctttgtgaaggagaaccaccggcaactccaagccaggatgggggacctgaaaggggtgctcgatgatctccaggacaatgaggttcttactgagaatgagaaggagctggtggagcaggaaaagacacggcagagcaagaatgaggccttgctgagcatggtggagaagaaaggggacctggccctggacgtgctcttcagaagcattagtgaaagggacccttacctcgtgtcctatcttagacagcagaatttgtaaaatgagtcagttaggtagtctggaagagagaatccagcgttctcattggaaatggataaacagaaatgtgatcattgatttcagtgttcaagacagaagaagactgggtaacatctatcacacaggctttcaggacagacttgtaacctggcatgtacctattgactgtatcctcatgcattttcctcaagaatgtctgaagaaggtagtaatattccttttaaattttttccaaccattgcttgatatatcactattttatccattgacatgattcttgaagacccaggataaaggacatccggataggtgtgtttatgaaggatggggcctggaaaggcaacttttcctgattaatgtgaaaaataattcctatggacactccgtttgaagtatcaccttctcataactaaaagcagaaaagctaacaaaagcttctcagctgaggacactcaaggcatacatgatgacagtcttttttttttttgtatgttaggactttaacactttatctatggctactgttattagaacaatgtaaatgtatttgctgaaagagagcacaaaaatgggagaaaatgcaaacatgagcagaaaatattttcccactggtgtgtagcctgctacaaggagttgttgggttaaatgttcatggtcaactccaaggaatactgagatgaaatgtggtaaatcaactccacagaaccaccaaaaagaaaatgagggtaattcagcttattctgagacagacattcctggcaatgtaccatacaaaaaataagccaactctgacatttggattctaccatagactctgtcattttgtagccatttcagctgtcttttgattaatgttttcgtggcacacatatttccatccttttatgtttaatctgtttaaaacaagttcctagtagacaccatctggttgagtcagttttttttatggtgtattttgaacccattctgatagtctcttttaactggaagatttcaattacttacgttaatgtaattattaatatgttaggatttatcctcagtcagccagtttgttatgtcttttctattctactgttatcacatttgtaccacttaaagtggaatctaggcactttatcaccatttagatcctattaccttttctcatctaggatatagttatcttctacataatctttctgtatcttaaaacccatcaataaattattatatattttctacttttaatcactcagaagatttaaaaaactcatgagaagagtaatctgttatgtttttccagatatttaccatttctgttgctcttccttcattattttccaaatttcgttctgcaaatttccacttcttctgatagacgttttttagttcttttagagtggttctgataggtacagattctcttattttttgcttcctctgaggacatctttttctcaccttcattctcagtgatgttttttgcttgtagtatttttagttgacattgttttctgttcagcagtttccttttagcttccgtatttcctgatgagaaatctgcagtcattcaaattgttgtttccctgtatgtagtgtgtcatttttctgtcagatttcaaggtatttatctttagtttttagccatttcattatgttggggatgagtttccttgttttattccctttggaatttgctccaattcataaatttgcagttttatgtcttttaccaaacttagaggttttcagcctaatttctaaaaatactttttattagcctgattttcatctttataggaaatagtttaagtgatgacaagttccaatagcttatatgcccagaaggccttcaaaataagaattttgaaagaatacagaaaacaaacttttatatccttctcatgtcttctactgtaaaattcatatgctttgctactctaaacctagtttgaaatcaacagtcttgagaatagatgaaaattttgatgaatagtggaattcttttaaatggaaacctcttacatgtgattttccttgccatctagaaataaaccatagtatttatgttgaatcaatcaatattatattttgtttttttcctcctcttctgagactcttattgtggaaatgttagacttttatgttttcctaaatgtccctgatattctacttatttagaacatcttttcattttttccattattctgattgggtaattttaatttgtctattttcaaatttgctggagtgttcacctgttgttgtctgtgtcgtcccactgagtgcattcaccaccttttaaattttggtcactgtatgtatcagttctaaaatttccattttgttctctatattttaaatttcttggcttatattctattttcctgcaaatgtgtcagcatttgcttgtttgagctttttttttttcaagacagggtctcaactctgttacccaggctggagtgcagtggtgcgatctcagctcactgcaacctctgcctcctggttcaagcgattattgtgcctcagcctcctgagtagctgggattacaggcatgcaccaccacagcccagctaattttttgtatttttagtagagacagagttttgctatgttggccaggctggttttgaactcctggcctcaagtgatccacccacctcagcctcccaaagtgctgggattacaggccactacacctggcacatttgagtattttttttttttttttttttttgagatggagtctcgctctgtcatctaggctggagtgcagtggtgtgatctcagctcactgcagcctctgtctcccgggctcaagcgattctcttgcctcagcctcctgagtagctaggactacaggtgcatgccaacacgcccggctaatttttttaaaaaatatttttagtagagacagggtttcaccattttggccaggatggtctcgatctcctgacctcatgatccacccgcctcggccttccaaagtgctgggattacaggcatgagccaccgtgcctggcctcatttgagtatttttataatgtctcttttaaagtctttgtcagataattccactgtacatgttattcagtgtttggtgtccactgagttgtcatttgccagacaagtggagatttttgcagctcatccttgtattctcagtagttccgatatgtaccctcgacatgtgaatgttatcttatgagactctgttttatttgtatccaacagaagatgtttattatttatttggctttctgtgaactgaggtcttaatatcagctcattttaaaagtctttgcagtggtattcggatctatcctgtgtgtgcctatgagattgggtgcagtgtatcctgttagctccattctcagggcgtttgaatgtgaattaggaccagcgcaatgaatgctcaagttggggttgggcgttagaattcataaaagtctttatatgctcag

SEQ ID NO: 68 - DNA, 2279 bp, Homo sapiens
catctcccccaacctgggggtcgtgttcttcaacgcctgcgaggccgcgtcgcggctggcgcgcggcgaggatgaggcggagctggcgctgagcctcctggcgcagctgggcatcacgcctctgccactcagccgcggccccgtgccagccaaacccaccgtgctcttcgagaagatgggcgtgggccggctggacatgtatgtgctgcacccgccctccgccggcgccgagcgcacgctggcctctgtgtgcgccctgctggtgtggcaccccgccggccccggcgagaaggtggtgcgcgtgctgttccccggttgcaccccgcccgcctgcctcctggacggcctggtccgcctgcagcacttgaggttcctgcgagagcccgtggtgacgccccaggacctggaggggccggggcgagccgagagcaaagagagcgtgggctcccgggacagctcgaagagagagggcctcctggccacccaccctagacctggccaggagcgccctggggtggcccgcaaggagccagcacgggctgaggccccacgcaagactgagaaagaagccaagaccccccgggagttgaagaaagaccccaaaccgagtgtctcccggacccagccgcgggaggtgcgccgggcagcctcttctgtgcccaacctcaagaagacgaatgcccaggcggcacccaagccccgcaaagcgcccagcacgtcccactctggcttcccgccggtggcaaatggaccccgcagcccgcccagcctccgatgtggagaagccagcccccccagtgcagcctgcggctctccggcctcccagctggtggccacgcccagcctggagctggggccgatcccagccggggaggagaaggcactggagctgcctttggccgccagctcaatcccaaggccacgcacaccctcccctgagtcccaccggagccccgcagagggcagcgagcggctgtcgctgagcccactgcggggcggggaggccgggccagacgcctcacccacagtgaccacacccacggtgaccacgccctcactacccgcagaggtgggctccccgcactcgaccgaggtggacgagtccctgtcggtgtcctttgagcaggtgctgccgccatccgcccccaccagtgaggctgggctgagcctcccgctgcgtggcccccgggcgcggcgctcggcttccccacacgatgtggacctgtgcctggtgtcaccctgtgaatttgagcatcgcaaggcggtgccaatggcaccggcacctgcgtcccccggcagctcgaatgacagcagtgcccggtcacaggaacgggcaggtgggctgggggccgaggagacgccacccacatcggtcagcgagtccctgcccaccctgtctgactcggatcccgtgcccctggcccccggtgcggcagactcagacgaagacacagagggctttggagtccctcgccacgaccctttgcctgaccccctcaaggtccccccaccactgcctgacccatccagcatctgcatggtggaccccgagatgctgccccccaagacagcacggcaaacggagaacgtcagccgcacccggaagcccctggcccgccccaactcacgcgctgccgcccccaaagccactccagtggctgctgccaaaaccaaggggcttgctggtggggaccgtgccagccgaccactcagtgcccggagtgagcccagtgagaagggaggccgggcacccctgtccagaaagtcctcaacccccaagactgccactcgaggcccgtcggggtcagccagcagccggcccggggtgtcagccaccccacccaagtccccggtctacctggacctggcctacctgcccagcgggagcagcgcccacctggtggatgaggagttcttccagcgcgtgcgcgcgctctgctacgtcatcagtggccaggaccagcgcaaggaggaaggcatgcgggccgtcctggacgcgctactggccagcaagcagcattgggaccgtgacctgcaggtgaccctgatccccactttcgactcggtggccatgcatacgtggtacgcagagacgcacgcccggcaccaggcgctgggcatcacggtgttgggcagcaacggcatggtgtccatgcaggatgacgccttcccggcctgcaaggtggagttctagccccatcgccgacacgccccccactcagcccagcccgcctgtccctagattcagccacatcagaaataaactgtgactacacttg

SEQ ID NO: 69 - protein, 229 aa, Homo sapiens
MGDKIWLPFPVLLLAALPPVLLPGAAGFTPSLDSDFTFTLPAGQKECFYQPMPLKASLEIEYQVLDGAGLDIDFHLASPEGKTLVFEQRKSDGVHTVETEVGDYMFCFDNTFSTISEKVIFFELILDNMGEQAQEQEDWKKYITGTDILDMKLEDILESINSIKSRLSKSGHIQTLLRAFEARDRNIQESNFDRVNFWSMVNLVVMVVVSAIQVYMLKSLFEDKRKSRT

SEQ ID NO: 70 - protein, 381 aa, Homo sapiens
MGPTSVPLVKAHRSSVSDYVNYDIIVRHYNYTGKLNISADKENSIKLTSVVFILICCFIILENIFVLLTIWKTKKFHRPMYYFIGNLALSDLLAGVAYTANLLLSGATTYKLTPAQWFLREGSMFVALSASVFSLLAIAIERYITMLKMKLHNGSNNFRLFLLISACWVISLILGGLPIMGWNCISALSSCSTVLPLYHKHYILFCTTVFTLLLLSIVILYCRIYSLVRTRSRRLTFRKNISKASRSSENVALLKTVIIVLSVFIACWAPLFILLLLDVGCKVKTCDILFRAEYFLVLAVLNSGTNPIIYTLTNKEMRRAFIRIMSCCKCPSGDSAGKFKRPIIAGMEFSRSKSDNSSHPQKDEGDNPETIMSSGNVNSSS

SEQ ID NO: 71 - protein, 679 aa, Homo sapiens
MATLITSTTAATAASGPLVDYLWMLILGFIIAFVLAFSVGANDVANSFGTAVGSGVVTLKQACILASIFETVGSVLLGAKVSETIRKGLIDVEMYNSTQGLLMAGSVSAMFGSAVWQLVASFLKLPISGTHCIVGATIGFSLVAKGQEGVKWSELIKIVMSWFVSPLLSGIMSGILFFLVRAFILHKADPVPNGLRALPVFYACTVGINLFSIMYTGAPLLGFDKLPLWGTILISVGCAVFCALIVWFFVCPRMKRKIEREIKCSPSESPLMEKKNSLKEDHEETKLSVGDIENKHPVSEVGPATVPLQAVVEERTVSFKLGDLEEAPERERLPSVDLKEETSIDSTVNGAVQLPNGNLVQFSQAVSNQINSSGHSQYHTVHKDSGLYKELLHKLHLAKVGDCMGDSGDKPLRRNNSYTSYTMAICGMPLDSFRAKEGEQKGEEMEKLTWPNADSKKRIRMDSYTSYCNAVSDLHSASEIDMSVKAAMGLGDRKGSNGSLEEWYDQDKPEVSLLFQFLQILTACFGSFAHGGNDVSNAIGPLVALYLVYDTGDVSSKVATPIWLLLYGGVGICVGLWVWGRRVIQTMGKDLTPITPSSGFSIELASALTVVIASNIGLPISTTHCKVGSVVSVGWLRSKKAVDWRLFRNIFMAWFVTVPISGVISAAIMAIFRYVILRM

SEQ ID NO: 72 - protein, 476 aa, Homo sapiens
MMHLAFLVLLCLPVCSAYPLSGAAKEEDSNKDLAQQYLEKYYNLEKDVKQFRRKDSNLIVKKIQGMQKFLGLEVTGKLDTDTLEVMRKPRCGVPDVGHFSSFPGMPKWRKTHLTYRIVNYTPDLPRDAVDSAIEKALKVWEEVTPLTFSRLYEGEADIMISFAVKEHGDFYSFDGPGHSLAHAYPPGPGLYGDIHFDDDEKWTEDASGTNLFLVAAHELGHSLGLFHSANTEALMYPLYNSFTELAQFRLSQDDVNGIQSLYGPPPASTEEPLVPTKSVPSGSEMPAKCDPALSFDAISTLRGEYLFFKDRYFWRRSHWNPEPEFHLISAFWPSLPSYLDAAYEVNSRDTVFIFKGNEFWAIRGNEVQAGYPRGIHTLGFPPTIRKIDAAVSDKEKKKTYFFAADKYWRFDENSQSMEQGFPRLIADDFPGVEPKVDAVLQAFGFFYFFSGSSQFEFDPNARMVTHILKSNSWLHC

SEQ ID NO: 73 - protein, 528 aa, Homo sapiens
MRCALALSALLLLLSTPPLLPSSPSPSPSPSPSQNATQTTTDSSNKTAPTPASSVTIMATDTAQQSTVPTSKANEILASVKATTLGVSSDSPGTTTLAQQVSGPVNTTVARGGGSGNPTTTIESPKSTKSADTTTVATSTATAKPNTTSSQNGAEDTTNSGGKSSHSVTTDLTSTKAEHLTTPHPTSPLSPRQPTLTHPVATPTSSGHDHLMKISSSSSTVAIPGYTFTSPGMTTTLPSSVISQRTQQTSSQMPASSTAPSSQETVQPTSPATALRTPTLPETMSSSPTAASTTHRYPKTPSPTVAHESNWAKCEDLETQTQSEKQLVLNLTGNTLCAGGASDEKLISLICRAVKATFNPAQDKCGIRLASVPGSQTVVVKEITIHTKLPAKDVYERLKDKWDELKEAGVSDMKLGDQGPPEEAEDRFSMPLIITIVCMASFLLLVAALYGCCHQRLSQRKDQQRLTEELQTVENGYHDNPTLEVMETSSEMQEKKVVSLNGELGDSWIVPLDNLTKDDLDEEEDTHL

SEQ ID NO: 74 - protein, 493 aa, Homo sapiens
MLKALFLTMLTLALVKSQDTEETITYTQCTDGYEWDPVRQQCKDIDECDIVPDACKGGMKCVNHYGGYLCLPKTAQIIVNNEQPQQETQPAEGTSGATTGVVAASSMATSGVLPGGGFVASAAAVAGPEMQTGRNNFVIRRNPADPQRIPSNPSHRIQCAAGYEQSEHNVCQDIDECTAGTHNCRADQVCINLRGSFACQCPPGYQKRGEQCVDIDECTIPPYCHQRCVNTPGSFYCQCSPGFQLAANNYTCVDINECDASNQCAQQCYNILGSFICQCNQGYELSSDRLNCEDIDECRTSSYLCQYQCVNEPGKFSCMCPQGYQVVRSRTCQDINECETTNECREDEMCWNYHGGFRCYPRNPCQDPYILTPENRCVCPVSNAMCRELPQSIVYKYMSIRSDRSVPSDIFQIQATTIYANTINTFRIKSGNENGEFYLRQTSPVSAMLVLVKSLSGPREHIVDLEMLTVSSIGTFRTSSVLRLTIIVGPFSF

SEQ ID NO: 75 - protein, 646 aa, Homo sapiens
MGLPRLVCAFLLAACCCCPRVAGVPGEAEQPAPELVEVEVGSTALLKCGLSQSQGNLSHVDWFSVHKEKRTLIFRVRQGQGQSEPGEYEQRLSLQDRGATLALTQVTPQDERIFLCQGKRPRSQEYRIQLRVYKAPEEPNIQVNPLGIPVNSKEPEEVATCVGRNGYPIPQVIWYKNGRPLKEEKNRVHIQSSQTVESSGLYTLQSILKAQLVKEDKDAQFYCELNYRLPSGNHMKESREVTVPVFYPTEKVWLEVEPVGMLKEGDRVEIRCLADGNPPPHFSISKQNPSTREAEEETTNDNGVLVLEPARKEHSGRYECQAWNLDTMISLLSEPQELLVNYVSDVRVSPAAPERQEGSSLTLTCEAESSQDLEFQWLREETDQVLERGPVLQLHDLKREAGGGYRCVASVPSIPGLNRTQLVKLAIFGPPWMAFKERKVWVKENMVLNLSCEASGHPRPTISWNVNGTASEQDQDPQRVLSTLNVLVTPELLETGVECTASNDLGKNTSILFLELVNLTTLTPDSNTTTGLSTSTASPHTRANSTSTERKLPEPESRGVVIVAVIVCILVLAVLGAVLYFLYKKGKLPCRRSGKQEITLPPSRKTELVVEVKSDKLPEEMGLLQGSSGDKRAPGDQGEKYIDLRH

SEQ ID NO: 76 - protein, 469 aa, Homo sapiens
MHSFPPLLLLLFWGVVSHSFPATLETQEQDVDLVQKYLEKYYNLKNDGRQVEKRRNSGPVVEKLKQMQEFFGLKVTGKPDAETLKVMKQPRCGVPDVAQFVLTEGNPRWEQTHLTYRIENYTPDLPRADVDHAIEKAFQLWSNVTPLTFTKVSEGQADIMISFVRGDHRDNSPFDGPGGNLAHAFQPGPGIGGDAHFDEDERWTNNFREYNLHRVAAHELGHSLGLSHSTDIGALMYPSYTFSGDVQLAQDDIDGIQAIYGRSQNPVQPIGPQTPKACDSKLTFDAITTIRGEVMFFKDRFYMRTNPFYPEVELNFISVFWPQLPNGLEAAYEFADRDEVRFFKGNKYWAVQGQNVLHGYPKDIYSSFGFPRTVKHIDAALSEENTGKTYFFVANKYWRYDEYKRSMDPGYPKMIAHDFPGIGHKVDAVFMKDGFFYFFHGTRQYKFDPKTKRILTLQKANSWFNCRKN

SEQ ID NO: 77 - protein, 384 aa, Homo sapiens
MDCSNGSAECTGEGGSKEVVGTFKAKDLIVTPATILKEKPDPNNLVFGTVFTDHMLTVEWSSEFGWEKPHIKPLQNLSLHPGSSALHYAVELFEGLKAFRGVDNKIRLFQPNLNMDRMYRSAVRATLPVFDKEELLECIQQLVKLDQEWVPYSTSASLYIRPAFIGTEPSLGVKKPTKALLFVLLSPVGPYFSSGTFNPVSLWANPKYVRAWKGGTGDCKMGGNYGSSLFAQCEDVDNGCQQVLWLYGRDHQITEVGTMNLFLYWINEDGEEELATPPLDGIILPGVTRRCILDLAHQWGEFKVSERYLTMDDLTTALEGNRVREMFSSGTACVVCPVSDILYKGETIHIPTMENGPKLASRILSKLTDIQYGREESDWTIVLS

SEQ ID NO: 78 - protein, 381 aa, Homo sapiens
MHLLAILFCALWSAVLAENSDDYDLMYVNLDNEIDNGLHPTEDPTPCDCGQEHSEWDKLFIMLENSQMRERMLLQATDDVLRGELQRLREELGRLAESLARPCAPGAPAEARLTSALDELLQATRDAGRRLARMEGAEAQRPEEAGRALAAVLEELRQTRADLHAVQGWAARSWLPAGCETAILFPMRSKKIFGSVHPVRPMRLESFSACIWVKATDVLNKTILFSYGTKRNPYEIQLYLSYQSIVFVVGGEENKLVAEAMVSLGRWTHLCGTWNSEEGLTSLWVNGELAATTVEMATGHIVPEGGILQIGQEKNGCCVGGGFDETLAFSGRLTGFNIWDSVLSNEEIRETGGAESCHIRGNIVGWGVTEIQPHGGAQYVS

SEQ ID NO: 79 - protein, 2813 aa, Homo sapiens
MIPARFAGVLLALALILPGTLCAEGTRGRSSTARCSLFGSDFVNTFDGSMYSFAGYCSYLLAGGCQKRSFSIIGDFQNGKRVSLSVYLGEFFDIHLFVNGTVTQGDQRVSMPYASKGLYLETEAGYYKLSGEAYGFVARIDGSGNFQVLLSDRYFNKTCGLCGNFNIFAEDDFMTQEGTLTSDPYDFANSWALSSGEQWCERASPPSSSCNISSGEMQKGLWEQCQLLKSTSVFARCHPLVDPEPFVALCEKTLCECAGGLECACPALLEYARTCAQEGMVLYGWTDHSACSPVCPAGMEYRQCVSPCARTCQSLHINEMCQERCVDGCSCPEGQLLDEGLCVESTECPCVHSGKRYPPGTSLSRDCNTCICRNSQWICSNEECPGECLVTGQSHFKSFDNRYFTFSGICQYLLARDCQDHSFSIVIETVQCADDRDAVCTRSVTVRLPGLHNSLVKLKHGAGVAMDGQDIQLPLLKGDLRIQHTVTASVRLSYGEDLQMDWDGRGRLLVKLSPVYAGKTCGLCGNYNGNQGDDFLTPSGLAEPRVEDFGNAWKLHGDCQDLQKQHSDPCALNPRMTRFSEEACAVLTSPTFEACHRAVSPLPYLRNCRYDVCSCSDGRECLCGALASYAAACAGRGVRVAWREPGRCELNCPKGQVYLQCGTPCNLTCRSLSYPDEECNEACLEGCFCPPGLYMDERGDCVPKAQCPCYYDGEIFQPEDIFSDHHTMCYCEDGFMHCTMSGVPGSLLPDAVLSSPLSHRSKRSLSCRPPMVKLVCPADNLRAEGLECTKTCQNYDLECMSMGCVSGCLCPPGMVRHENRCVALERCPCFHQGKEYAPGETVKIGCNTCVCRDRKWNCTDHVCDATCSTIGMAHYLTFDGLKYLFPGECQYVLVQDYCGSNPGTFRILVGNKGCSHPSVKCKKRVTILVEGGEIELFDGEVNVKRPMKDETHFEVVESGRYIILLLGKALSVVWDRHLSISVVLKQTYQEKVCGLCGNFDGIQNNDLTSSNLQVEEDPVDFGNSWKVSSQCADTRKVPLDSSPATCHNNIMKQTMVDSSCRILTSDVFQDCNKLVDPEPYLDVCIYDTCSCESIGDCACFCDTIAAYAHVCAQHGKVVTWRTATLCPQSCEERNLRENGYECEWRYNSCAPACQVTCQHPEPLACPVQCVEGCHAHCPPGKILDELLQTCVDPEDCPVCEVAGRRFASGKKVTLNPSDPEHCQICHCDVVNLTCEACQEPGGLVVPPTDAPVSPTTLYVEDISEPPLHDFYCSRLLDLVFLLDGSSRLSEAEFEVLKAFVVDMMERLRISQKWVRVAVVEYHDGSHAYIGLKDRKRPSELRRIASQVKYAGSQVASTSEVLKYTLFQIFSKIDRPEASRIALLLMASQEPQRMSRNFVRYVQGLKKKKVIVIPVGIGPHANLKQIRLIEKQAPENKAFVLSSVDELEQQRDEIVSYLCDLAPEAPPPTLPPHMAQVTVGPGLLGVSTLGPKRNSMVLDVAFVLEGSDKIGEADFNRSKEFMEEVIQRMDVGQDSIHVTVLQYSYMVTVEYPFSEAQSKGDILQRVREIRYQGGNRTNTGLALRYLSDHSFLVSQGDREQAPNLVYMVTGNPASDEIKRLPGDIQVVPIGVGPNANVQELERIGWPNAPILIQDFETLPREAPDLVLQRCCSGEGLQIPTLSPAPDCSQPLDVILLLDGSSSFPASYFDEMKSFAKAFISKANIGPRLTQVSVLQYGSITTIDVPWNVVPEKAHLLSLVDVMQREGGPSQIGDALGFAVRYLTSEMHGARPGASKAVVILVTDVSVDSVDAAADAARSNRVTVFPIGIGDRYDAAQLRILAGPAGDSNVVKLQRIEDLPTMVTLGNSFLHKLCSGFVRICMDEDGNEKRPGDVWTLPDQCHTVTCQPDGQTLLKSHRVNCDRGLRPSCPNSQSPVKVEETCGCRWTCPCVCTGSSTRHIVTFDGQNFKLTGSCSYVLFQNKEQDLEVILHNGACSPGARQGCMKSIEVKHSALSVELHSDMEVTVNGRLVSVPYVGGNMEVNVYGAIMHEVRFNHLGHIFTFTPQNNEFQLQLSPKTFASKTYGLCGICDENGANDFMLRDGTVTTDWKTLVQEWTVQRPGQTCQPILEEQCLVPDSSHCQVLLLPLFAECHKVLAPATFYAICQQDSCHQEQVCEVIASYAHLCRTNGVCVDWRTPDFCAMSCPPSLVYNHCEHGCPRHCDGNVSSCGDHPSEGCFCPPDKVMLEGSCVPEEACTQCIGEDGVQHQFLEAWVPDHQPCQICTCLSGRKVNCTTQPCPTAKAPTCGLCEVARLRQNADQCCPEYECVCDPVSCDLPPVPHCERGLQPTLTNPGECRPNFTCACRKEECKRVSPPSCPPHRLPTLRKTQCCDEYECACNCVNSTVSCPLGYLASTATNDCGCTTTTCLPDKVCVHRSTIYPVGQFWEEGCDVCTCTDMEDAVMGLRVAQCSQKPCEDSCRSGFTYVLHEGECCGRCLPSACEVVTGSPRGDSQSSWKSVGSQWASPENPCLINECVRVKEEVFIQQRNVSCPQLEVPVCPSGFQLSCKTSACCPSCRCERMEACMLNGTVIGPGKTVMIDVCTTCRCMVQVGVISGFKLECRKTTCNPCPLGYKEENNTGECCGRCLPTACTIQLRGGQIMTLKRDETLQDGCDTHFCKVNERGEYFWEKRVTGCPPFDEHKCLAEGGKIMKIPGTCCDTCEEPECNDITARLQYVKVGSCKSEVEVDIHYCQGKCASKAMYSIDINDVQDQCSCCSPTRTEPMQVALHCTNGSVVYHEVLNAMECKCSPRKCSK

SEQ ID NO: 80 - protein, 1039 aa, Homo sapiens
MAVQLVPDSALGLLMMTEGRRCQVHLLDDRKLELLVQPKLLAKELLDLVASHFNLKEKEYFGIAFTDETGHLNWLQLDRRVLEHDFPKKSGPVVLYFCVRFYIESISYLKDNATIELFFLNAKSCIYKELIDVDSEVVFELASYILQEAKGDFSSNEVVRSDLKKLPALPTQALKEHPSLAYCEDRVIEHYKKLNGQTRGQAIVNYMSIVESLPTYGVHYYAVKDKQGIPWWLGLSYKGIFQYDYHDKVKPRKIFQWRQLENLYFREKKFSVEVHDPRRASVTRRTFGHSGIAVHTWYACPALIKSIWAMAISQHQFYLDRKQSKSKIHAARSLSEIAIDLTETGTLKTSKLANMGSKGKIISGSSGSLLSSGSQESDSSQSAKKDMLAALKSRQEALEETLRQRLEELKKLCLREAELTGKLPVEYPLDPGEEPPIVRRRIGTAFKLDEQKILPKGEEAELERLEREFAIQSQITEAARRLASDPNVSKKLKKQRKTSYLNALKKLQEIENAINENRIKSGKKPTQRASLIIDDGNIASEDSSLSDALVLEDEDSQVTSTISPLHSPHKGLPPRPPSHNRPPPPQSLEGLRQMHYHRNDYDKSPIKPKMWSESSLDEPYEKVKKRSSHSHSSSHKRFPSTGSCAEAGGGSNSLQNSPIRGLPHWNSQSSMPSTPDLRVRSPHYVHSTRSVDISPTRLHSLALHFRHRSSSLESQGKLLGSENDTGSPDFYTPRTRSSNGSDPMDDCSSCTSHSSSEHYYPAQMNANYSTLAEDSPSKARQRQRQRQRAAGALGSASSGSMPNLAARGGAGGAGGAGGGVYLHSQSQPSSQYRIKEYPLYIEGGATPVVVRSLESDQECHYSVKAQFKTSNSYTAGGLFKESWRGGGGDEGDTGRLTPSRSQILRTPSLGREGAHDKGAGRAAVSDELRQWYQRSTASHKEHSRLSHTSSTSSDSGSQYSTSSQSTFVAHSRVTRMPQMCKATSAALPQSQRSSTPSSEIGATPPSSPHHILTWQTGEATENSPILDGSESPPHQSTDE

SEQ ID NO: 81 - protein, 748 aa, Homo sapiens
MSNPGGRRNGPVKLRLTVLCAKNLVKKDFFRLPDPFAKVVVDGSGQCHSTDTVKNTLDPKWNQHYDLYIGKSDSVTISVWNHKKIHKKQGAGFLGCVRLLSNAINRLKDTGYQRLDLCKLGPNDNDTVRGQIVVSLQSRDRIGTGGQVVDCSRLFDNDLPDGWEERRTASGRIQYLNHITRTTQWERPTRPASEYSSPGRPLSCFVDENTPISGTNGATCGQSSDPRLAERRVRSQRHRNYMSRTHLHTPPDLPEGYEQRTTQQGQVYFLHTQTGVSTWHDPRVPRDLSNINCEELGPLPPGWEIRNTATGRVYFVDHNNRTTQFTDPRLSANLHLVLNRQNQLKDQQQQQVVSLCPDDTECLTVPRYKRDLVQKLKILRQELSQQQPQAGHCRIEVSREEIFEESYRQVMKMRPKDLWKRLMIKFRGEEGLDYGGVAREWLYLLSHEMLNPYYGLFQYSRDDIYTLQINPDSAVNPEHLSYFHFVGRIMGMAVFHGHYIDGGFTLPFYKQLLGKSITLDDMELVDPDLHNSLVWILENDITGVLDHTFCVEHNAYGEIIQHELKPNGKSIPVNEENKKEYVRLYVNWRFLRGIEAQFLALQKGFNEVIPQHLLKTFDEKELELIICGLGKIDVNDWKVNTRLKHCTPDSNIVKWFWKAVEFFDEERRARLLQFVTGSSRVPLQGFKALQGAAGPRLFTIHQIDACTNNLPKAHTCFNRIDIPPYESYEKLYEKLLTAIEETCGFAVE

SEQ ID NO: 82 - protein, 199 aa, Homo sapiens
PLWTEPPLSCCLPATYPADRGPAEPCSCAGVILGFLLFRGHNSQPTMTQTSSSQGGLGGLSLTTEPVSSNPGYIPSSEANRPSHLSSTGTPGAGVPSSGRDGGTSRDTFQTVPPNSTTMSLSMREDATILPSPTSETVLTVAAFGVISFIVILVVVVIILVGVVSLRFKCRKSKESGDPQKPGEREEKVGHRREPYPWN

SEQ ID NO: 83 - protein, 652 aa, Homo sapiens
MATSMGLLLLLLLLLTQPGAGTGADTEAVVCVGTACYTAHSGKLSAAEAQNHCNQNGGNLATVKSKEEAQHVQRVLAQLLRREAALTARMSKFWIGLQREKGKCLDPSLPLKGFSWVGGGEDTPYSNWHKELRNSCISKRCVSLLLDLSQPLLPNRLPKWSEGPCGSPGSPGSNIEGFVCKFSFKGMCRPLALGGPGQVTYTTPFQTTSSSLEAVPFASAANVACGEGDKDETQSHYFLCKEKAPDVFDWGSSGPLCVSPKYGCNFNNGGCHQDCFEGGDGSFLCGCRPGFRLLDDLVTCASRNPCSSSPCRGGATCVLGPHGKNYTCRCPQGYQLDSSQLDCVDVDECQDSPCAQECVNTPGGFRCECWVGYEPGGPGEGACQDVDECALGRSPCAQGCTNTDGSFHCSCEEGYVLAGEDGTQCQDVDECVGPGGPLCDSLCFNTQGSFHCGCLPGWVLAPNGVSCTMGPVSLGPPSGPPDEEDKGEKEGSTVPRAATASPTRGPEGTPKATPTTSRPSLSSDAPITSAPLKMLAPSGSSGVWREPSIHHATAASGPQEPAGGDSSVATQNNDGTDGQKLLLFYILGTVVAILLLLALALGLLVYRKRRAKREEKKEKKPQNAADSYSWVPERAESRAMENQYSPTPGTDC

SEQ ID NO: 84 - protein, 1338 aa, Homo sapiens
MVSYWDTGVLLCALLSCLLLTGSSSGSKLKDPELSLKGTQHIMQAGQTLHLQCRGEAAHKWSLPEMVSKESERLSITKSACGRNGKQFCSTLTLNTAQANHTGFYSCKYLAVPTSKKKETESAIYIFISDTGRPFVEMYSEIPEIIHMTEGRELVIPCRVTSPNITVTLKKFPLDTLIPDGKRIIWDSRKGFIISNATYKEIGLLTCEATVNGHLYKTNYLTHRQTNTIIDVQISTPRPVKLLRGHTLVLNCTATTPLNTRVQMTWSYPDEKNKRASVRRRIDQSNSHANIFYSVLTIDKMQNKDKGLYTCRVRSGPSFKSVNTSVHIYDKAFITVKHRKQQVLETVAGKRSYRLSMKVKAFPSPEVVWLKDGLPATEKSARYLTRGYSLIIKDVTEEDAGNYTILLSIKQSNVFKNLTATLIVNVKPQIYEKAVSSFPDPALYPLGSRQILTCTAYGIPQPTIKWFWHPCNHNHSEARCDFCSNNEESFILDADSNMGNRIESITQRMAIIEGKNKMASTLVVADSRISGIYICIASNKVGTVGRNISFYITDVPNGFHVNLEKMPTEGEDLKLSCTVNKFLYRDVTWILLRTVNNRTMHYSISKQKMAITKEHSITLNLTIMNVSLQDSGTYACRARNVYTGEEILQKKEITIRDQEAPYLLRNLSDHTVAISSSTTLDCHANGVPEPQITWFKNNHKIQQEPGIILGPGSSTLFIERVTEEDEGVYHCKATNQKGSVESSAYLTVQGTSDKSNLELITLTCTCVAATLFWLLLTLLIRKMKRSSSEIKTDYLSIIMDPDEVPLDEQCERLPYDASKWEFARERLKLGKSLGRGAFGKVVQASAFGIKKSPTCRTVAVKMLKEGATASEYKALMTELKILTHIGHHLNVVNLLGACTKQGGPLMVIVEYCKYGNLSNYLKSKRDLFFLNKDAALHMEPKKEKMEPGLEQGKKPRLDSVTSSESFASSGFQEDKSLSDVEEEEDSDGFYKEPITMEDLISYSFQVARGMEFLSSRKCIHRDLAARNILLSENNVVKICDFGLARDIYKNPDYVRKGDTRLPLKWMAPESIFDKIYSTKSDVWSYGVLLWEIFSLGGSPYPGVQMDEDFCSRLREGMRMRAPEYSTPEIYQIMLDCWHRDPKERPRFAELVEKLGDLLQANVQQDGKDYIPINAILTGNSGFTYSTPAFSEDFFKESISAPKFNSGSSDDVRYVNAFKFMSLERIKTFEELLPNATSMFDDYQGDSSTLLASPMLKRFTWTDSKPKASLKIDLRVTSKSKESGLSDVSRPSFCHSSCGHVSEGKRRFTYDHAELERKIACCSPPPDYNSVVLYSTPPI

SEQ ID NO: 85 - protein, 289 aa, Homo sapiens
MENGYTYEDYKNTAEWLLSHTKHRPQVAIICGSGLGGLTDKLTQAQIFDYSEIPNFPRSTVPGHAGRLVFGFLNGRACVMMQGRFHMYEGYPLWKVTFPVRVFHLLGVDTLVVTNAAGGLNPKFEVGDIMLIRDHINLPGFSGQNPLRGPNDERFGDRFPAMSDAYDRTMRQRALSTWKQMGEQRELQEGTYVMVAGPSFETVAECRVLQKLGADAVGMSTVPEVIVARHCGLRVFGFSLITNKVIMDYESLEKANHEEVLAAGKQAAQKLEQFVSILMASIPLPDKAS

SEQ ID NO: 86 - protein, 509 aa, Homo sapiens
MPPEQHHQPNKVSPKLCSAQPAPRGRRRPGGRGPAAGGRTFANARFVLGEGVAIERGADDTTQPPVAGSVNPEGAAAALVPLAGARVAAAADALHDAPRAVPGLLALGLVTGQADQRPGAGARQQQQQPQQRDQEVPAAGQPPVPRHQVHPPAPPPPPPRSRAGSGAGALPCAGHTRRRRRTSSPRSSPPLSGPPGRASPRGARPPPLLRAAPTPSPRALAPAAASPPPPPPPPGREGEKRKKFPPGSSGSTQTSGAAAAVAAALGSSPGRRRLLPLLLRVGRPRSGAASGPVPASRAAEWARWRSTRSAASAPRAPLASLLRRSSGRLFMAGASAARAAPSPILPPPPDLPPTPTRRAPLIGCPPSPARPAPSASPSPSRAAGPFLPPSHASTSSRSPPPRARRTEPAVPPSCGSGPGAAGALRMGLGRTQRAARVAVSRALAGTVAAAAGLGARRARRLHLRGQIGVRRVAGTPEARGRGDGCSLGRVSPDRTPGKGSKGMEPPHTG

SEQ ID NO: 87 - protein, 4 aa, Artificial Sequence
  nuclear target motif
RRRP

SEQ ID NO: 88 - protein, 4 aa, Artificial Sequence
  nuclear target motif
RRRR

SEQ ID NO: 89 - protein, 4 aa, Artificial Sequence
  nuclear target motif
KRKK

SEQ ID NO: 90 - protein, 7 aa, Artificial Sequence
  nuclear target motif
PPRARRT

SEQ ID NO: 91 - protein, 7 aa, Artificial Sequence
  nuclear target motif
PRARRTE

SEQ ID NO: 92 - protein, 712 aa, Homo sapiens
  MOD_RES (510)...(510): Xaa = Phe, Leu, Ile or Val
MKTAALTPPRSPPPPPLRPPPMKRLPLLVVFSTLLNCSYTQNCTKTPCLPNAKCEIRNGIEACYCNMGFSGNGVTICEDDNECGNLTQSCGENANCTNTEGSYYCMCVPGFRSSSNQDRFITNDGTVCIENVNANCHLDNVCIAANINKTLTKIRSIKEPVALLQEVYRNSVTDLSPTDIITYIEILAESSSLLGYKNNTISAKDTLSNSTLTEFVKTVNNFVQRDTFVVWDKLSVNHRRTHLTKLMHTVEQATLRISQSFQKTTEFDTNSTDIALKVFFFDSYNMKHIHPHMNMDGDYINIFPKRKAAYDSNGNVAVAFLYYKSIGPLLSSSDNFLLKPQNYDNSEEEERVISSVISVSMSSNPPTLYELEKITFTLSHRKVTDRYRSLCAFWNYSPDTMNGSWSSEGCELTYSNETHTSCRCNHLTHFAILMSSGPSIGIKDYNILTRITQLGIIISLICLAICIFTFWFFSEIQSTRTTIHKNLCCSLFLAELVFLVGINTNTNKLXSVSIIAGLLHYFFLAAFAWMCIEGIHLYLIVVGVIYNKGFLHKNFYIFGYLSPAVVVGFSAALGYRYYGTTKVCWLSTETHFIWSFIGPACLIILVNLLAFGVIIYKVFRHTAGLKPEVSCFENIRSCARGALALLFLLGTTWIFGVLHVVHASVVTAYLFTVSNAFQGMFIFLFLCVLSRKIQEEYYRLFKNVPCCFGCLR

SEQ ID NO: 93 - protein, 948 aa, Homo sapiens
MILSLLFSLGGPLGWGLLGAWAQASSTSLSDLQSSRTPGVWKAEAEDTSKDPVGRNWCPYPMSKLVTLLALCKTEKFLIHSQQPCPQGAPDCQKVKVMYRMAHKPVYQVKQKVLTSLAWRCCPGYTGPNCEHHDSMAIPEPADPGDSHQEPQDGPVSFKPGHLAAVINEVEVQQEQQEHLLGDLQNDVHRVADSLPGLWKALPGNLTAAVMEANQTGHEFPDRSLEQVLLPHVDTFLQVHFSPIWRSFNQSLHSLTQAIRNLSLDVEANRQAISRVQDSAVARADFQELGAKFEAKVQENTQRVGQLRQDVEDRLHAQHFTLHRSISELQADVDTKLKRLHKAQEAPGTNGSLVLATPGAGARPEPDSLQARLGQLQRNLSELHMTTARREEELQYTLEDMRATLTRHVDEIKELYSESDETFDQISKVERQVEELQVNHTALRELRVILMEKSLIMEENKEEVERQLLELNLTLQHLQGGHADLIKYVKDCNCQKLYLDLDVIREGQRDATRALEETQVSLDERRQLDGSSLQALQNAVDAVSLAVDAHKAEGERARAATSRLRSQVQALDDEVGALKAAAAEARHEVRQLHSAFAALLEDALRHEAVLAALFGEEVLEEMSEQTPGPLPLSYEQIRVALQDAASGLQEQALGWDELAARVTALEQASEPPRPAEHLEPSHDAGREEAATTALAGLARELQSLSNDVKNVGRCCEAEAGAGAASLNASLDGLHNALFATQRSLEQHQRLFHSLFGNFQGLMEANVSLDLGKLQTMLSRKGKKQQKDLEAPRKRDKKEAEPLVDIRVTGPVPGALGAALWEASPVAFYASFSEGTAALQTVKFNTTYINIGSSYFPEHGYFRAPERGVYLFAVSVEFGPGPGTGQLVFGGHHRTPVCTTGQGSGSTATVFAMAELQKGERVWFELTQGSITKRSLSGTAFGGFLMFKT

SEQ ID NO: 94 - protein, 647 aa, Homo sapiens
MGKDFMTKTPKAFATKAKIDKWDLIKLKSFCTAKETIIRVNSQPTDWQKTFAIYPSDKGVIARIYKELEQIYKKKKPTKTLRTHFLSRPKGNCWPLGPRGDSWQLGGPSGARAEGKGGGTGLGKPAVEGGDRAPDTALRPRAGQIQVGSSSACGASENEAGVRPVPPLAGALARAGRRRTPHCRPCWLLGLGGLLQPAPRYHEAAGGRGGLHPARWGAQHRACGRRAARCARAPAGRPRARRGLQRPAVLGRTGAQAFPLHPGERAFAGFLLAVLRPRRSRKRHAAVGGGAPTLLHRAEMRGTPGHRWGRARSWKEMRCHLRANGYLCKYQFEVLCPAPRPGAASNLSYRAPFQLHSAALDFSPPGTEVSALCRGQLPISVTCIADEIGARWDKLSGDVLCPCPGRYLRAGKCAELPNCLDDLGGFACECATGFELGKDGRSCVTSGEGQPTLGGTGVPTRRPPATATSPVPQRTWPIRVDEKLGETPLVPEQDNSVTSIPEIPRWGSQSTMSTLQMSLQAESKATITPSGSVISKFNSTTSSATPQAFDSSSAVVFIFVSTAVVVLVILTMTVLGLVKLCFHESPSSQPRKESMGPPGLESDPEPAALGSSSAHCTNNGVKVGDCDLRDRAEGALLAESPLGSSDA

SEQ ID NO: 95 - protein, 462 aa, Homo sapiens
MIQTVPDPAAHIKEALSVVSEDQSLFECAYGTPHLAKTEMTASSSSDYGQTSKMSPRVPQQDWLSQPPARVTIKMECNPSQVNGSRNSPDECSVAKGGKMVGSPDTVGMNYGSYMEEKHMPPPNMTTNERRVIVPADPTLWSTDHVRQWLEWAVKEYGLPDVNILLFQNIDGKELCKMTKDDFQRLTPSYNADILLSHLHYLRETPLPHLTSDDVDKALQNSPRLMHARNTDLPYEPPRRSAWTGHGHPTPQSKAAQPSPSTVPKTEDQRPQLDPYQILGPTSSRLANPGSGQIQLWQFLLELLSDSSNSSCITWEGTNGEFKMTDPDEVARRWGERKSKPNMNYDKLSRALRYYYDKNIMTKVHGKRYAYKFDFHGIAQALQPHPPESSLYKYPSDLPYMGSYHAHPQKMNFVAPHPPALPVTSSSFFAAPNPYWNSPTGGIYPNTRLPTSHMPSHLGTYY

SEQ ID NO: 96 - protein, 503 aa, Homo sapiens
MTLGSPRKGLLMLLMALVTQGDPVKPSRGPLVTCTCESPHCKGPTCRGAWCTVVLVREEGRHPQEHRGCGNLHRELCRGRPTEFVNHYCCDSHLCNHNVSLVLEATQPPSEQPGTDGQLALILGPVLALLALVALGVLGLWHVRRRQEKQRGLHSELGESSLILKASEQGDTMLGDLLDSDCTTGSGSGLPFLVQRTVARQVALVECVGKGRYGEVWRGLWHGESVAVKIFSSRDEQSWFRETEIYNTVLLRHDNILGFIASDMTSRNSSTQLWLITHYHEHGSLYDFLQRQTLEPHLALRLAVSAACGLAHLHVEIFGTQGKPAIAHRDFKSRNVLVKSNLQCCIADLGLAVMHSQGSDYLDIGNNPRVGTKRYMAPEVLDEQIRTDCFESYKWTDIWAFGLVLWEIARRTIVNGIVEDYRPPFYDVVPNDPSFEDMKKVVCVDQQTPTIPNRLAADPVLSGLAQMMRECWYPNPSARLTALRIKKTLQKISNSPEKPKVIQ

SEQ ID NO: 97 - protein, 54 aa, Homo sapiens
MEWNGMAWNRIKWNGINSSGMEWNGMEWNAVQCNRMEWNELELTGMEWNGMHLN

SEQ ID NO: 98 - protein, 275 aa, Homo sapiens
MSSFGYRTLTVALFTLICCPGSDEKVFEVHVRPKKLAVEPKGSLEVNCSTTCNQPEVGGLETSLNKILLDEQAQWKHYLVSNISHDTVLQCHFTCSGKQESMNSNVSVYQPPRQVILTLQPTLVAVGKSFTIECRVPTVEPLDSLTLFLFRGNETLHYETFGKAAPAPQEATATFNSTADREDGHRNFSCLAVLDLMSRGGNIFHKHSAPKMLEIYEPVSDSQMVIIVTVVSVLLSLFVTSVLLCFIFGQHLRQQRMGTYGVRAAWRRLPQAFRP

SEQ ID NO: 99 - protein, 784 aa, Homo sapiens
MQRLMMLLATSGACLGLLAVAAVAAAGANPAQRDTHSLLPTHRRQKRDWIWNQMHIDEEKNTSLPHHVGKIKSSVSRKNAKYLLKGEYVGKVFRVDAETGDVFAIERLDRENISEYHLTAVIVDKDTGENLETPSSFTIKVHDVNDNWPVFTHRLFNASVPESSAVGTSVISVTAVDADDPTVGDHASVMYQILKGKEYFAIDNSGRIITITKSLDREKQARYEIVVEARDAQGLRGDSGTATVLVTLQDINDNFPFFTQTKYTFVVPEDTRVGTSVGSLFVEDPDEPQNRMTKYSILRGDYQDAFTIETNPAHNEGIIKPMKPLDYEYIQQYSFIVEATDPTIDLRYMSPPAGNRAQVIINITDVDEPPIFQQPFYHFQLKENQKKPLIGTVLAMDPDAARHSIGYSIRRTSDKGQFFRVTKKGDIYNEKELDREVYPWYNLTVEAKELDSTGTPTGKESIVQVHIEVLDENDNAPEFAKPYQPKVCENAVHGQLVLQISAIDKDITPRNVKFKFTLNTENNFTLTDNHDNTANITVKYGQFDREHTKVHFLPVVISDNGMPSRTGTSTLTVAVCKCNEQGEFTFCEDMAAQVGVSIQAVVAILLCILTITVITLLIFLRRRLRKQARAHGKSVPEIHEQLVTYDEEGGGEMDTTSYDVSVLNSVRRGGAKPPRPALDARPSLYAQVQKPPRHAPGAHGGPGEMAAMIEVKKDEADHDGDGPPYDTLHIYGYEGSESIAESLSSLGTDSSDSDVDYDFLNDWGPRFKMLAELYGSDPREELLY

SEQ ID NO: 100 - protein, 774 aa, Homo sapiens
MERPLCSHLCSCLAMLALLSPLSLAQYDSWPHYPEYFQQPAPEYHQPQAPANVAKIQLRLAGQKRKHSEGRVEVYYDGQWGTVCDDDFSIHAAHVVCRELGYVEAKSWTASSSYGKGEGPIWLDNLHCTGNEATLAACTSNGWGVTDCKHTEDVGVVCSDKRIPGFKFDNSLINQIENLNIQVEDIRIRAILSTYRKRTPVMEGYVEVKEGKTWKQICDKHWTAKNSRVVCGMFGFPGERTYNTKVYKMFASRRKQRYWPFSMDCTGTEAHISSCKLGPQVSLDPMKNVTCENGLPAVVSCVPGQVFSPDGPSRFRKAYKPEQPLVRLRGGAYIGEGRVEVLKNGEWGTVCDDKWDLVSASVVCRELGFGSAKEAVTGSRLGQGIGPIHLNEIQCTGNEKSIIDCKFNAESQGCNHEEDAGVRCNTPAMGLQKKLRLNGGRNPYEGRVEVLVERNGSLVWGMVCGQNWGIVEAMVVCRQLGLGFASNAFQETWYWHGDVNSNKVVMSGVKCSGTELSLAHCRHDGEDVACPQGGVQYGAGVACSETAPDLVLNAEMVQQTTYLEDRPMFMLQCAMEENCLSASAAQTDPTTGYRRLLRFSSQIHNNGQSDFRPKNGRHAWIWHDCHRHYHSMEVFTHYDLLNLNGTKVAEGHKASFCLEDTECEGDIQKNYECANFGDQGITMGCWDMYRHDIDCQWVDITDVPPGDYLFQVVINPNFEVAESDYSNNIMKCRSRYDGHRIWMYNCHIGGSFSEETEKKFEHFSGLLNNQLSPQ

SEQ ID NO: 101 - protein, 1138 aa, Homo sapiens
MVWRVPPFLLPILFLASHVGAAVDLTLLANLRLTDPQRFFLTCVSGEAGAGRGSDAWGPPLLLEKDDRIVRTPPGPPLRLARNGSHQVTLRGFSKPSDLVGVFSCVGGAGARRTRVIYVHNSPGAHLLPDKVTHTVNKGDTAVLSARVHKEKQTDVIWKSNGSYFYTLDWHEAQDGRFLLQLPNVQPPSSGIYSATYLEASPLGSAFFRLIVRGCGAGRWGPGCTKECPGCLHGGVCHDHDGECVCPPGFTGTRCEQACREGRFGQSCQEQCPGISGCRGLTFCLPDPYGCSCGSGWRGSQCQEACAPGHFGADCRLQCQCQNGGTCDRFSGCVCPSGWHGVHCEKSDRIPQILNMASELEFNLETMPRINCAAAGNPFPVRGSIELRKPDGTVLLSTKAIVEPEKTTAEFEVPRLVLADSGFWECRVSTSGGQDSRRFKVNVKVPPVPLAAPRLLTKQSRQLVVSPLVSFSGDGPISTVRLHYRPQDSTMDWSTIVVDPSENVTLMNLRPKTGYSVRVQLSRPGEGGEGAWGPPTLMTTDCPEPLLQPWLEGWHVEGTDRLRVSWSLPLVPGPLVGDGFLLRLWDGTRGQERRENVSSPQARTALLTGLTPGTHYQLDVQLYHCTLLGPASPPAHVLLPPSGPPAPRHLHAQALSDSEIQLTWKHPEALPGPISKYVVEVQVAGGAGDPLWIDVDRPEETSTIIRGLNASTRYLFRMRASIQGLGDWSNTVEESTLGNGLQAEGPVQESRAAEEGLDQQLILAVVGSVSATCLTILAALLTLVCIRRSCLHRRRTFTYQSGSGEETILQFSSGTLTLTRRPKLQPEPLSYPVLEWEDITFEDLIGEGNFGQVIRAMIKKDGLKMNAAIKMLKEYASENDHRDFAGELEVLCKLGHHPNIINLLGACKNRGYLYIAIEYAPYGNLLDFLRKSRVLETDPAFAREHGTASTLSSRQLLRFASDAANGMQYLSEKQFIHRDLAARNVLVGENLASKIADFGLSRGEEVYVKKTMGRLPVRWMAIESLNYSVYTTKSDVWSFGVLLWEIVSLGGTPYCGMTCAELYEKLPQGYRMEQPRNCDDEVYELMRQCWRDRPYERPPFAQIALQLGRMLEARKAYVNMSLFENFTYAGIDATAEEA

SEQ ID NO: 102 - protein, 149 aa, Homo sapiens
MPVMRLFPCFLQLLAGLALPAVPPQQWALSAGNGSSEVEVVPFQEVWGRSYCRALERLVDVVSEYPSEVEHMFSPSCVSLLRCTGCCGDENLHCVPVETANVTMQLLKIRSGDRPSYVELTFSQHVRCECRPLREKMKPERCGDAVPRR

SEQ ID NO: 103 - protein, 1376 aa, Homo sapiens
MEGDRVAGRPVLSSLPVLLLLQLLMLRAAALHPDELFPHGESWWDQLLQEGDDVKLSRGEAGESPALLTKPDSATSTWAPTASSPLRTSPGKRSMWTMISPPTSRPSPLFWRTSTRATAEAESCTERTPPPQCWAWPPAMCALASRALRAFYPHPRLPGHLGAGRRLRGGQTRALPSGELNTFQAVLASDGSDSYALFLYPANGLQFLGTRPKESYNVQLQLPARVGFCRGEADDLKSEGPYFSLTSTEQSVKNLYQLSNLGIPGVWAFHIGSTSPLDNVRPAAVGDLSAAHSSVPLGRSFSHATALESDYNEDNLDYYDVNEEEAEYLPGEPEEALNGHSSIDVSFQSKVDTKPLEESSTLDPHTKEGTSLGEVGGPDLKGQVEPWDERETRSPAPPEVDRDSLAPSWETPPPYPENGSIQPYPDGGPVPSEMDVPPAHPEEEIVLRSYPASGHTTPLSRGTYEVGLEDNIGSNTEVFTYNAANKETCEHNHRQCSRHAFCTDYATGFCCHCQSKFYGNGKHCLPEGAPHRVNGKVSGHLHVGHTPVHFTDVDLHAYIVGNDGRAYTAISHIPQPAAQALLPLTPIGGLFGWLFALEKPGSENGFSLAGAAFTHDMEVTFYPGEETVRITQTAEGLDPENYLSIKTNIQGQVPYVPANFTAHISPYKELYHYSDSTVTSTSSRDYSLTFGAINQTWSYRIHQNITYQVCRHAPRHPSFPTTQQLNVDRVFALYNDEERVLRFAVTNQIGPVKEDSDPTPVNPCYDGSHMCDTTARCHPGTGVDYTCECASGYQGDGRNCVDENECATGFHRCGPNSVCINLPGSYRCECRSGYEFADDRHTCILITPPANPCEDGSHTCAPAGQARCVHHGGSTFSCACLPGYAGDGHQCTDVDECSENRCHPAATCYNTPGSFSCRCQPGYYGDGFQCIPDSTSSLTPCEQQQRHAQAQYAYPGARFHIPQCDEQGNFLPLQCHGSTGFCWCVDPDGHEVPGTQTPPGSTPPHCGPSPEPTQRPPTICERWRENLLEHYGGTPRDDQYVPQCDDLGHFIPLQCHGKSDFCWCVDKDGREVQGTRSQPGTTPACIPTVAPPMVRPTPRPDVTPPSVGTFLLYTQGQQIGYLPLNGTRLQKDAAKTLLSLHGSIIVGIDYDCRERMVYWTDVAGRTISRAGLELGAEPETIVNSGLISPEGLAIDHIRRTMYWTDSVLDKIESALLDGSERKVLFYTDLVNPRAIAVDPIRGNLYWTDWNREAPKIETSSLDGENRRILINTDIGLPNGLTFDPFSKLLCWADAGTKKLECTLPDGTGRRVIQNNLKYPFSIVSYADHFYHTDWRRDGVVSVNKHSGQFTDEYLPEQRSHLYGITAVYPYCPTGRK

SEQ ID NO: 104 - protein, 493 aa, Homo sapiens
MTANGTAEAVQIQFGLINCGNKYLTAEAFGFKVNASASSLKKKQIWTLEQPPDEAGSAAVCLRSHLGRYLAADKDGNVTCEREVPGPDCRFLIVAHDDGRWSLQSEAHRRYFGGTEDRLSCFAQTVSPAEKWSVHIAMHPQVNIYSVTRKRYAHLSARPADEIAVDRDVPWGVDSLITLAFQDQRYSVQTADHRFLRHDGRLVARPEPATGYTLEFRSGKVAFRDCEGRYLAPSGPSGTLKAGKATKVGKDELFALEQSCAQVVLQAANERNVSTRQGMDLSANQDEETDQETFQLEIDRDTKKCAFRTHTGKYWTLTATGGVQSTASSKNASCYFDIEWRDRRITLRASNGKFVTSKKNGQLAASVETAGDSELFLMKLINRPIIVFRGEHGFIGCRKVTGTLDANRSSYDVFQLEFNDGAYNIKDSTGKYWTVGSDSAVTSSGDTPVDFFFEFCDYNKVAIKVGGRYLKGDHAGVLKASAETVDPASLWEY

SEQ ID NO: 105 - protein, 238 aa, Homo sapiens
MLTTLLPILLLSGWAFCSQDASDGLQRLHMLQISYFRDPYHVWYQGNASLGGHLTHVLEGPDTNTTIIQLQPLQEPESWARTQSGLQSYLLQFHGLVRLVHQERTLAFPLTIRCFLGCELPPEGSRAHVFFEVAVNGSSFVSFRPERALWQADTQVTSGVVTFTLQQLNAYNRTRYELREFLEDTCVQYVQKHISAENTKGSQTSRSYTSLVLGVLVGGFIIAGVAVGIFLCTGGRRC

SEQ ID NO: 106 - protein, 646 aa, Homo sapiens; identical to SEQ ID NO: 75

SEQ ID NO: 107 - protein, 212 aa, Homo sapiens
MDYLLMIFSLLFVACQGAPETAVLGAELSAVGENGGEKPTPSPPWRLRRSKRCSCSSLMDKECVYFCHLDIIWVNTPEHVVPYGLGSPRSKRALENLLPTKATDRENRCQCASQKDKKCWNFCQAGKELRAEDIMEKDWNNHKKGKDCSKLGKKCIYQQLVRGRKIRRSSEEHLRQTRSETMRNSVKSSFHDPKLKGKPSRERYVTHNRAHW

SEQ ID NO: 108 - protein, 675 aa, Homo sapiens
MDTKSILEELLLKRSQQKKKMSPNNYKERLFVLTKTNLSYYEYDKMKRGSRKGSIEIKKIRCVEKVNLEEQTPVERQYPFQIVYKDGLLYVYASNEESRSQWLKALQKEIRGNPHLLVKYHSGFFVDGKFLCCQQSCKAAPGCTLWEAYANLHTAVNEEKHRVPTFPDRVLKIPRAVPVLKMDAPSSSTTLAQYDNESKKNYGSQPPSSSTSLAQYDSNSKKIYGSQPNFNMQYIPREDFPDWWQVRKLKSSSSSEDVASSNQKERNVNHTTSKISWEFPESSSSEEEENLDDYDWFAGNISRSQSEQLLRQKGKEGAFMVRNSSQVGMYTVSLFSKAVNDKKGTVKHYHVHTNAENKLYLAENYCFDSIPKLIHYHQHNSAGMITRLRHPVSTKANKVPDSVSLGNGIWELKREEITLLKELGSGQFGVVQLGKWKGQYDVAVKMIKEGSMSEDEFFQEAQTMMKLSHPKLVKFYGVCSKEYPIYIVTEYISNGCLLNYLRSHGKGLEPSQLLEMCYDVCEGMAFLESHQFIHRDLAARNCLVDRDLCVKVSDFGMTRYVLDDQYVSSVGTKFPVKWSAPEVFHYFKYSSKSDVWAFGILMWEVFSLGKQPYDLYDNSQVVLKVSQGHRLYRPHLASDTIYQIMYSCWHELPEKRPTFQQLLSSIEPLREKDKH

SEQ ID NO: 109 - protein, 604 aa, Homo sapiens
MLARALLLCAVLALSHTANPCCSHPCQNRGVCMSVGFDQYKCDCTRTGFYGENCSTPEFLTRIKLFLKPTPNTVHYILTHFKGFWNVVNNIPFLRNAIMSYVLTSRSHLIDSPPTYNADYGYKSWEAFSNLSYYTRALPPVPDDCPTPLGVKGKKQLPDSNEIVEKLLLRRKFIPDPQGSNMMFAFFAQHFTHQFFKTDHKRGPAFTNGLGHGVDLNHIYGETLARQRKLRLFKDGKMKYQIIDGEMYPPTVKDTQAEMIYPPQVPEHLRFAVGQEVFGLVPGLMMYATIWLREHNRVCDVLKQEHPEWGDEQLFQTSRLILIGETIKIVIEDYVQHLSGYHFKLKFDPELLFNKQFQYQNRIAAEFNTLYHWHPLLPDTFQIHDQKYNYQQFIYNNSILLEHGITQFVESFTRQIAGRVAGGRNVPPAVQKVSQASIDQSRQMKYQSFNEYRKRFMLKPYESFEELTGEKEMSAELEALYGDIDAVELYPALLVEKPRPDAIFGETMVEVGAPFSLKGLMGNVICSPAYWKPSTFGGEVGFQIINTASIQSLICNNVKGCPFTSFSVPDPELIKTVTINASSSRSGLDDINPTVLLKERSTEL

SEQ ID NO: 110 - protein, 715 aa, Homo sapiens
MVQKYQSPVRVYKYPFELIMAAYERRFPTCPLIPMFVGSDTVSEFKSEDGAIHVIERRCKLDVDAPRLLKKIAGVDYVYFVQKNSLNSRERTLHIEAYNETFSNRVIINEHCCYTVHPENEDWTCFEQSASLDIKSFFGFESTVEKIAMKQYTSNIKKGKEIIEYYLRQLEEEGITFVPRWSPPSITPSSETSSSSSKKQAASMAVVIPEAALKEGLSGDALSSPSAPEPVVGTPDDKLDADHIKRYLGDLTPLQESCLIRLRQWLQETHKGKIPKDEHILRFLRARDFNIDKAREIMCQSLTWRKQHQVDYILETWTPPQVLQDYYAGGWHHHDKDGRPLYVLRLGQMDTKGLVRALGEEALLRYVLSVNEERLRRCEENTKVFGRPISSWTCLVDLEGLNMRHLWRPGVKALLRIIEVVEANYPETLGRLLILRAPRVFPVLWTLVSPFIDDNTRRKFLIYAGNDYQGPGGLLDYIDKEIIPDFLSGECMCEVPEGGLVPKSLYRTAEELENEDLKLWTETIYQSASVFKGAPHEILIQIVDASSVITWDFDVCKGDIVFNIYHSKRSPQPPKKDSLGAHSITSPGGNNVQLIDKVWQLGRDYSMVESPLICKEGESVQGSHVTRWPGFYILQWKFHSMPACAASSLPRVDDVLASLQVSSHKCKVMYYTEVIGSEDFRGSMTSLESSHSGFSQLSAATTSSSQSHSSSMISR

SEQ ID NO: 111 - protein, 532 aa, Homo sapiens
MAPSSPRPALPALLVLLGALFPGPGNAQTSVSPSKVILPRGGSVLVTCSTSCDQPKLLGIETPLPKKELLLPGNNRKVYELSNVQEDSQPMCYSNCPDGQSTAKTFLTVYWTPERVELAPLPSWQPVGKNLTLRCQVEGGAPRANLTVVLLRGEKELKREPAVGEPAEVTTTVLVRRDHHGANFSCRTELDLRPQGLELFENTSAPYQLQTFVLPATPPQLVSPRVLEVDTQGTVVCSLDGLFPVSEAQVHLALGDQRLNPTVTYGNDSFSAKASVSVTAEDEGTQRLTCAVILGNQSQETLQTVTIYSFPAPNVILTKPEVSEGTEVTVKCEAHPRAKVTLNGVPAQPLGPRAQLLLKATPEDNGRSFSCSATLEVAGQLIHKNQTRELRVLYGPRLDERDCPGNWTWPENSQQTPMCQAWGNPLPELKCLKDGTFPLPIGESVTVTRDLEGTYLCRARSTQGEVTREVTVNVLSPRYEIVIITVVAAAVIMGTAGLSTYLYNRQRKIKKYRLQQAQKGTPMKPNTQATPP

SEQ ID NO: 112 - protein, 1124 aa, Homo sapiens
MDSLASLVLCGVSLLLSGTVEGAMDLILINSLPLVSDAETSLTCIASGWRPHEPITIGRDFEALMNQHQDPLEVTQDVTREWAKKVVWKREKASKINGAYFCEGRVRGEAIRIRTMKMRQQASFLPATLTMTVDKGDNVNISFKKVLIKEEDAVIYKNGSFIHSVPRHEVPDILEVHLPHAQPQDAGVYSARYIGGNLFTSAFTRLIVRRCEAQKWGPECNHLCTACMNNGVCHEDTGECICPPGFMGRTCEKACELHTFGRTCKERCSGQEGCKSYVFCLPDPYGCSCATGWKGLQCNEACHPGFYGPDCKLRCSCNNGEMCDRFQGCLCSPGWQGLQCEREGIPRMTPKIVDLPDHIEVNSGKFNPICKASGWPLPTNEEMTLVKPDGTVLHPKDFNHTDHFSVAIFTIHRILPPDSGVWVCSVNTVAGMVEKPFNISVKVLPKPLNAPNVIDTGHNFAVINISSEPYFGDGPIKSKKLLYKPVNHYEAWQHIQVTNEIVTLNYLEPRTEYELCVQLVRRGEGGEGHPGPVRRFTTASIGLPPPRGLNLLPKSQTTLNLTWQPIFPSSEDDFYVEVERRSVQKSDQQNIKVPGNLTSVLLNNLHPREQYVVRARVNTKAQGEWSEDLTAWTLSDILPPQPENIKISNITHSSAVISWTILDGYSISSITIRYKVQGKNEDQHVDVKIKNATIIQYQLKGLEPETAYQVDIFAENNIGSSNPAFSHELVTLPESQAPADLGGGKMLLIAILGSAGMTCLTVLLAFLIILQLKRANVQRRMAQAFQNVREEPAVQFNSGTLALNRKVKNNPDPTIYPVLDWNDIKFQDVIGEGNFGQVLKARIKKDGLRMDAAIKRMKEYASKDDHRDFAGELEVLCKLGHHPNIINLLGACEHRGYLYLAIEYAPHGNLLDFLRKSRVLETDPAFAIANSTASTLSSQQLLHFAADVARGMDYLSQKQFIHRDLAARNILVGENYVAKIADFGLSRGQEVYVKKTMGRLPVRWMAIESLNYSVYTTNSDVWSYGVLLWEIVSLGGTPYCGMTCAELYEKLPQGYRLEKPLNCDDEVYDLMRQCWREKPYERPSFAQILVSLNRMLEERKTYVNTTLYEKFTYAGIDCSAEEAA

SEQ ID NO: 113 - protein, 308 aa, Homo sapiens
MPGQELRTVNGSQMLLVLLVLSWLPHGGALSLAEASRASFPGPSELHSEDSRFRELRKRYEDLLTRLRANQSWEDSNTDLVPAPAVRILTPEVRLGSGGHLHLRISRAALPEGLPEASRLHRALFRLSPTASRSWDVTRPLRRQLSLARPQAPALHLRLSPPPSQSDQLLAESSSARPQLELHLRPQAARGRRRARARNGDDCPLGPGRCCRLHTVRASLEDLGWADWVLSPREVQVTMCIGACPSQFRAANMHAQIKTSLHRLKPDTEPAPCCVPASYNPMVLIQKTDTGVSLQTYDDLLAKDCHCI

SEQ ID NO: 114 - protein, 1170 aa, Homo sapiens
MGLAWGLGVLFLMHVCGTNRIPESGGDNSVFDIFELTGAARKGSGRRLVKGPDPSSPAFRIEDANLIPPVPDDKFQDLVDAVRAEKGFLLLASLRQMKKTRGTLLALERKDHSGQVFSVVSNGKAGTLDLSLTVQGKQHVVSVEEALLATGQWKSITLFVQEDRAQLYIDCEKMENAELDVPIQSVFTRDLASIARLRIAKGGVNDNFQGVLQNVRFVFGTTPEDILRNKGCSSSTSVLLTLDNNVVNGSSPAIRTNYIGHKTKDLQAICGISCDELSSMVLELRGLRTIVTTLQDSIRKVTEENKELANELRRPPLCYHNGVQYRNNEEWTVDSCTECHCQNSVTICKKVSCPIMPCSNATVPDGECCPRCWPSDSADDGWSPWSEWTSCSTSCGNGIQQRGRSCDSLNNRCEGSSVQTRTCHIQECDKRFKQDGGWSHWSPWSSCSVTCGDGVITRIRLCNSPSPQMNGKPCEGEARETKACKKDACPINGGWGPWSPWDICSVTCGGGVQKRSRLCNNPAPQFGGKDCVGDVTENQICNKQDCPIDGCLSNPCFAGVKCTSYPDGSWKCGACPPGYSGNGIQCTDVDECKEVPDACFNHNGEHRCENTDPGYNCLPCPPRFTGSQPFGQGVEHATANKQVCKPRNPCTDGTHDCNKNAKCNYLGHYSDPMYRCECKPGYAGNGIICGEDTDLDGWPNENLVCVANATYHCKKDNCPNLPNSGQEDYDKDGIGDACDDDDDNDKIPDDRDNCPFHYNPAQYDYDRDDVGDRCDNCPYNHNPDQADTDNNGEGDACAADIDGDGILNERDNCQYVYNVDQRDTDMDGVGDQCDNCPLEHNPDQLDSDSDRIGDTCDNNQDIDEDGHQNNLDNCPYVPNANQADHDKDGKGDACDHDDDNDGIPDDKDNCRLVPNPDQKDSDGDGRGDACKDDFDHDSVPDIDDICPENVDISETDFRRFQMIPLDPKGTSQNDPNWVVRHQGKELVQTVNCDPGLAVGYDEFNAVDFSGTFFINTERDDDYAGFVFGYQSSSRFYVVMWKQVTQSYWDTNPTRAQGYSGLSVKVVNSTTGPGEHLRNALWHTGNTPGQVRTLWHDPRHIGWKDFTAYRWRLSHRPKTGFIRVVMYEGKKIMADSGPIYDKTYAGGRLGLFVFSQEMVFFSDLKYECRDP

SEQ ID NO: 115 - protein, 373 aa, Homo sapiens
MSSTPHDPFYSSPFGPFYRRHTPYMVQPEYRIYEMNKRLQSRTEDSDNLWWDAFATEFFEDDATLTLSFCLEDGPKRYTIGRTLIPRYFSTVFEGGVTDLYYILKHSKESYHNSSITVDCDQCTMVTQHGKPMFTKVCTEGRLILEFTFDDLMRIKTWHFTIRQYRELVPRSILAMHAQDPQVLDQLSKNITRMGLTNFTLNYLRLCVILEPMQELMSRHKTYNLSPRDCLKTCLFQKWQRMVAPPAEPTRQPTTKRRKRKNSTSSTSNSSAGNNANSTGSKKKTTAANLSLSSQVPDVMVVGEPTLMGGEFGDEDERLITRLENTQYDAANGMDDEEDFNNSPALGNNSPWNSKPPATQETKSENPPPQASQ

SEQ ID NO: 116 - protein, 73 aa, Homo sapiens
MPALHIEDLPEKEKLKMEVEQLRKEVKLQRQQVSKCSEEIKNYIEERSGEDPLVKGIPEDKNPFKEKGSCVIS

SEQ ID NO: 117 - protein, 667 aa, Homo sapiens
MHHQQRMAALGTDKELSDLLDFSAMFSPPVSSGKNGPTSLASGHFTGSNVEDRSSSGSWGNGGHPSPSRNYGDGTPYDHMTSRDLGSHDNLSPPFVNSRIQSKTERGSYSSYGRESNLQGCHQQSLLGGDMDMGNPGTLSPTKPGSQYYQYSSNNPRRRPLHSSAMEVQTKKVRKVPPGLPSSVYAPSASTADYNRDSPGYPSSKPATSTFPSSFFMQDGHHSSDPWSSSSGMNQPGYAGMLGNSSHIPQSSSYCSLHPHERLSYPSHSSADINSSLPPMSTFHRSGTNHYSTSSCTPPANGTDSIMANRGSGAAGSSQTGDALGKALASIYSPDHTNNSFSSNPSTPVGSPPSLSAGTAVWSRNGGQASSSPNYEGPLHSLQSRIEDRLERLDDAIHVLRNHAVGPSTAMPGGHGDMHGIIGPSHNGAMGGLGSGYGTGLLSANRHSLMVGTHREDGVALRGSHSLLPNQVPVPQLPVQSATSPDLNPPQDPYRGMPPGLQGQSVSSGSSEIKSDDEGDENLQDTKSSEDKKLDDDKKDIKSITSNNDDEDLTPEQKAEREKERRMANNARERLRVRDINEAFKELGRMVQLHLKSDKPQTKLLILHQAVAVILSLEQQVRERNLNPKAACLKRREEEKVSSEPPPLSLAGPHPGMGDASNHMGQM

SEQ ID NO: 118 - protein, 749 aa, Homo sapiens
MSFIDPYQHIIVEHQYSHKFTVVVLRATKVTKGAFGDMLDTPDPYVELFISTTPDSRKRTRHFNNDINPVWNETFEFILDPNQENVLEITLMDANYVMDETLGTATFTVSSMKVGEKKEVPFIFNQVTEMVLEMSLEVCSCPDLRFSMALCDQEKTFRQQRKEHIRESMKKLLGPKNSEGLHSARDVPVVAILGSGGGFRAMVGFSGVMKALYESGILDCATYVAGLSGSTWYMSTLYSHPDFPEKGPEEINEELMKNVSHNPLLLLTPQKVKRYVESLWKKKSSGQPVTFTDIFGMLIGETLIHNRMNTTLSSLKEKVNTAQCPLPLFTCLHVKPDVSELMFADWVEFSPYEIGMAKYGTFMAPDLFGSKFFMGTVVKKYEENPLHFLMGVWGSAFSILFNRVLGVSGSQSRGSTMEEELENITTKHIVSNDSSDSDDESHEPKGTENEDAGSDYQSDNQASWIHRMIMALVSDSALFNTREGRAGKVHNFMLGLNLNTSYPLSPLSDFATQDSFDDDELDAAVADPDEFERIYEPLDVKSKKIHVVDSGLTFNLPYPLILRPQRGVDLIISFDFSARPSDSSPPFKELLLAEKWAKMNKLPFPKIDPYVFDREGLKECYVFKPKNPDMEKDCPTIIHFVLANINFRKYKAPGVPRETEEEKEIADFDIFDDPESPFSTFNFQYPNQAFKRLHDLMHFNTLNNIDVIKEAMVESIEYRRQNPSRCSVSLSNVEARRFFNKEFLSKPKA

SEQ ID NO: 119 - protein, 235 aa, Homo sapiens
MDPARPLGLSILLLFLTEAALGDAAQEPTGNNAEICLLPLDYGPCRALLLRYYYDRYTQSCRQFLYGGCEGNANNFYTWEACDDACWRIEKVPKVCRLQVSVDDQCEGSTEKYFFNLSSMTCEKFFSGGCHRNRIENRFPDEATCMGFCAPKKIPSFCYSPKDEGLCSANVTRYYFNPRYRTCDAFTYTGCGGNDNNFVSREDCKRACAKALKKKKKMPKLRFASRIRKIRKKQF

SEQ ID NO: 120 - protein, 2058 aa, Homo sapiens
MDNFFTEGTRVWLRENGQHFPSTVNSCAEGIVVFRTDYGQVFTYKQSTITHQKVTAMHPTNEEGVDDMASLTELHGGSIMYNLFQRYKRNQIYTYIGSILASVNPYQPIAGLYEPATMEQYSRRHLGELPPHIFAIANECYRCLWKRYDNQCILISGESGAGKTESTKLILKFLSVISQQSLELSLKEKTSCVERAILESSPIMEAFGNAKTVYNNNSSRFGKFVQLNICQKGNIQGGRIVDYLLEKNRVVRQNPGERNYHIFYALLAGLEHEEREEFYLSTPENYHYLNQSGCVEDKTISDQESFREVITAMDVMQFSKEEVREVSRLLAGILHLGNIEFITAGGAQVSFKTALGRSAELLGLDPTQLTDALTQRSMFLRGEEILTPLNVQQAVDSRDSLAMALYACCFEWVIKKINSRIKGNEDFKSIGILDIFGFENFEVNHFEQFNINYANEKLQEYFNKHIFSLEQLEYSREGLVWEDIDWIDNGECLDLIEKKLGLLALINEESHFPQATDSTLLEKLHSQHANNHFYVKPRVAVNNFGVKHYAGEVQYDVRGILEKNRDTFRDDLLNLLRESRFDFIYDLFEHVSSRNNQDTLKCGSKHRRPTVSSQFKDSLHSLMATLSSSNPFFVRCIKPNMQKMPDQFDQAVVLNQLRYSGMLETVRIRKAGYAVRRPFQDFYKRYKVLMRNLALPEDVRGKCTSLLQLYDASNSEWQLGKTKVFLRESLEQKLEKRREEEVSHAAMVIRAHVLGFLARKQYRKVLYCVVIIQKNYRAFLLRRRFLHLKKAAIVFQKQLRGQIARRVYRQLLAEKREQEEKKKQEEEEKKKREEEERERERERREAELRAQQEEETRKQQELEALQKSQKEAELTRELEKQKENKQVEEILRLEKEIEDLQRMKEQQELSLTEASLQKLQERRDQELRRLEEEACRAAQEFLESLNFDEIDECVRNIERSLSVGSEFSSELAESACEEKPNFNFSQPYPEEEVDEGFEADDDAFKDSPNPSEHGHSDQRTSGIRTSDDSSEEDPYMNDTVVPTSPSADSTVLLAPSVQDSGSLHNSSSGESTYCMPQNAGDLPSPDGDYDYDQDDYEDGAITSGSSVTFSNSYGSQWSPDYRCSVGTYNSSGAYRFSSEGAQSSFEDSEEDFDSRFDTDDELSYRRDSVYSCVTLPYFHSFLYMKGGLMNSWKRRWCVLKDETFLWFRSKQEALKQGWLHKKGGGSSTLSRRNWKKRWFVLRQSKLMYFENDSEEKLKGTVEVRTAKEIIDNTTKENGIDIIMADRTFHLIAESPEDASQWFSVLSQVHASTDQEIQEMHDEQANPQNAVGTLDVGLIDSVCASDSPDRPNSFVIITANRVLHCNADTPEEMHHWITLLQRSKGDTRVEGQEFIVRGWLHKEVKNSPKMSSLKLKKRWFVLTHNSLDYYKSSEKNALKLGTLVLNSLCSVVPPDEKIFKETGYWNVTVYGRKHCYRLYTKLLNEATRWSSAIQNVTDTKAPIDTPTQQLIQDIKENCLNSDVVEQIYKRNPILRYTHHPLHSPLLPLPYGDINLNLLKDKGYTTLQDEAIKIFNSLQQLESMSDPIPIIQGILQTGHDLRPLRDELYCQLIKQTNKVPHPGSVGNLYSWQILTCLSCTFLPSRGILKYLKFHLKRIREQFPGTEMEKYALFTYESLKKTKCREFVPSRDEIEALIHRQEMTSTVYCHGGGSCKITINSHTTAGEVVEKLIRGLAMEDSRNMFALFEYNGHVDKAIESRTVVADVLAKFEKLAATSEVGDLPWKFYFKLYCFLDTDNVPKDSVEFAFMFEQAHEAVIHGHHPAPEENLQVLAALRLQYLQGDYTLHAAIPPLEEVYSLQRLKARISQSTKTFTPCERLEKRRTSFLEGTLRRSFRTGSVVRQKVEEEQMLDMWIKEEVSSARASIIDKWRKFQGMNQEQAMAKYMALIKEWPGYGSTLFDVECKEGGFPQELWLGVSADAVSVYKRGEGRPLEVFQYEHILSFGAPLANTYKIVVDERELLFETSEVVDVAKLMKAYISMIVKKRYSTTRSASSQGSSR

SEQ ID NO: 121 - protein, 461 aa, Homo sapiens [sequence omitted]

SEQ ID NO: 122 - protein, 610 aa, Homo sapiens
MIASQFLSALTLVLLIKESGAWSYNTSTEAMTYDEASAYCQQRYTHLVAIQNKEEIEYLNSILSYSPSYYWIGIRKVNNVWVWVGTQKPLTEEAKNWAPGEPNNRQKDEDCVEIYIKREKDVGMWNDERCSKKKLALCYTAACTNTSCSGHGECVETINNYTCKCDPGFSGLKCEQIVNCTALESPEHGSLVCSHPLGNFSYNSSCSISCDRGYLPSSMETMQCMSSGEWSAPIPACNVVECDAVTNPANGFVECFQNPGSFPWNTTCTFDCEEGFELMGAQSLQCTSSGNWDNEKPTCKAVTCRAVRQPQNGSVRCSHSPAGEFTFKSSCNFTCEEGFMLQGPAQVECTTQGQWTQQIPVCEAFQCTALSNPERGYMNCLPSASGSFRYGSSCEFSCEQGFVLKGSKRLQCGPTGEWDNEKPTCEAVRCDAVHQPPKGLVRCAHSPIGEFTYKSSCAFSCEEGFELYGSTQLECTSQGQWTEEVPSCQVVKCSSLAVPGKINMSCSGEPVFGTVCKFACPEGWTLNGSAARTCGATGHWSGLLPTCEAPTESNIPLVAGLSAAGLSLLTLAPFLLWLRKCLRKAKKFVPASSCQSLESDGSYQKPSYIL

SEQ ID NO: 123 - protein, 352 aa, Homo sapiens
MEGISIYTSDNYTEEMGSGDYDSMKEPCFREENANFNKIFLPTIYSIIFLTGIVGNGLVILVMGYQKKLRSMTDKYRLHLSVADLLFVITLPFWAVDAVANWYFGNFLCKAVHVIYTVNLYSSVLILAFISLDRYLAIVHATNSQRPRKLLAEKVVYVGVWIPALLLTIPDFIFANVSEADDRYICDRFYPNDLWVVVFQFQHIMVGLILPGIVILSCYCIIISKLSHSKGHQKRKALKTTVILILAFFACWLPYYIGISIDSFILLEIIKQGCEFENTVHKWISITEALAFFHCCLNPILYAFLGAKFKTSAQHALTSVSRGSSLKILSKGKRGGHSSVSTESESSSFHSS

SEQ ID NO: 124 - protein, 184 aa, Homo sapiens
MKSVLLLTTLLVPAHLVAAWSNNYAVDCPQHCDSSECKSSPRCKRTVLDDCGCCRVCAAGRGETCYRTVSGMDGMKCGPGLRCQPSNGEDPFGEEFGICKDCPYGTFGMDCRETCNCQSGICDRGTGKCLKFPFFQYSVTKSSNRFVSLTEHDMASGDGNIVREEVVKENAAGSPVMRKWLNPR

SEQ ID NO: 125 - protein, 1496 aa, Homo sapiens
SRPWWLRASERPSAPSAMAKRSRGPGRRCLLALVLFCAWGTLAVVAQKPGAGCPSRCLCFRTTVRCMHLLLEAVPAVAPQTSILDLRFNRIREIQPGAFRRLRNLNTLLLNNNQIKRIPSGAFEDLENLKYLYLYKNEIQSIDRQAFKGLASLEQLYLHFNQIETLDPDSFQHLPKLERLFLHNNRITHLVPGTFNHLESMKRLRLDSNTLHCDCEILWLADLLKTYAESGNAQAAAICEYPRRIQGRSVATITPEELNCERPRITSEPQDADVTSGNTVYFTCRAEGNPKPEIIWLRNNNELSMKTDSRLNLLDDGTLMIQNTQETDQGIYQCMAKNVAGEVKTQEVTLRYFGSPARPTFVIQPQNTEVLVGESVTLECSATGHPPPRISWTRGDRTPLPVDPRVNITPSGGLYIQNVVQGDSGEYACSATNNIDSVHATAFIIVQALPQFTVTPQDRVVIEGQTVDFQCEAKGNPPPVIAWTKGGSQLSVDRRHLVLSSGTLRISGVALHDQGQYECQAVNIIGSQKVVAHLTVQPRVTPVFASIPSDTTVEVGANVQLPCSSQGEPEPAITWNKDGVQVTESGKFHISPEGFLTINDVGPADAGRYECVARNTIGSASVSMVLSVNVPDVSRNGDPFVATSIVEAIATVDRAINSTRTHLFDSRPRSPNDLLALFRYPRDPYTVEQARAGEIFERTLQLIQEHVQHGLMVDLNGTSYHYNDLVSPQYLNLIANLSGCTAHRRVNNCSDMCFHQKYRTHDGTCNNLQHPMWGASLTAFERLLKSVYENGFNTPRGINPHRLYNGHALPMPRLVSTTLIGTETVTPDEQFTHMLMQWGQFLDHDLDSTVVALSQARFSDGQHCSNVCSNDPPCFSVMIPPNDSRARSGARCMFFVRSSPVCGSGMTSLLMNSVYPREQINQLTSYIDASNVYGSTEHEARSIRDLASHRGLLRQGIVQRSGKPLLPFATGPPTECMRDENESPIPCFLAGDHRANEQLGLTSMHTLWFREHNRIATELLKLNPHWDGDTIYYETRKIVGAEIQHITYQHWLPKILGEVGMRTLGEYHGYDPGINAGIFNAFATAAFRFGHTLVNPLLYRLDENFQPIAQDHLPLHKAFFSPFRIVNEGGIDPLLRGLFGVAGKMRVPSQLLNTELTERLFSMAHTVALDLAAINIQRGRDHGIPPYHDYRVYCNLSAAHTFEDLKNEIKNPEIREKLKRLYGSTLNIDLFPALVVEDLVPGSRLGPTLMCLLSTQFKRLRDGDRLWYENPGVFSPAQLTQIKQTSLARILCDNADNITRVQSDVFRVAEFPHGYGSCDEIPRVDLRVWQDCCEDCRTRGQFNAFSYHFRGRRSLEFSYQEDKPTKKTRPRKIPSVGRQGEHLSNSTSAFSTRSDASGTNDFREFVLEMQKTITDLRTQIKKLESRLSTTECVDAGGESHANNTKWKKDACTICECKDGQVTCFVEACPPATCAVPVNIPGACCPVCLQKRAEEKP

SEQ ID NO: 126 - protein, 1165 aa, Homo sapiens
MANDSPAKSLVDIDLSSLRDPAGIFELVEVVGNGTYGQVYKGRHVKTGQLAAIKVMDVTEDEEEEIKLEINMLKKYSHHRNIATYYGAFIKKSPPGHDDQLWLVMEFCGAGSITDLVKNTKGNTLKEDWIAYISREILRGLAHLHIHHVIHRDIKGQNVLLTENAEVKLVDFGVSAQLDRTVGRRNTFIGTPYWMAPEVIACDENPDATYDYRSDLWSCGITAIEMAEGAPPLCDMHPMRALFLIPRNPPPRLKSKKWSKKFFSFIEGCLVKNYMQRPSTEQLLKHPFIRDQPNERQVRIQLKDHIDRTRKKRGEKDETEYEYSGSEEEEEEVPEQEGEPSSIVNVPGESTLRRDFLRLQQENKERSEALRRQQLLQEQQLREQEEYKRQLLAERQKRIEQQKEQRRRLEEQQRREREARRQQEREQRRREQEEKRRLEELERRRKEEEERRRAEEEKRRVEREQEYIRRQLEEEQRHLEVLQQQLLQEQAMLLHDHRRPHPQHSQQPPPPQQERSKPSFHAPEPKAHYEPADRAREVPVRTTSRSPVLSRRDSPLQGSGQQNSQAGQRNSTSIEPRLLWERVEKLVPRPGSGSSSGSSNSGSQPGSHPGSQSGSGERFRVRSSSKSEGSPSQRLENAVKKPEDKKEVFRPLKPAGEVDLTALAKELRAVEDVRPPHKVTDYSSSSEESGTTDEEDDDVEQEGADESTSGPEDTRAASSLNLSNGETESVKTMIVHDDVESEPAMTPSKEGTLIVRQTQSASSTLQKHKSSSSFTPFIDPRLLQISPSSGTTVTSVVGFSCDGMRPEAIRQDPTRKGSVVNVNPTNTRPQSDTPEIRKYKKRFNSEILCAALWGVNLLVGTESGLMLLDRSGQGKVYPLINRRRFQQMDVLEGLNVLVTISGKKDKLRVYYLSWLRNKILHNDPEVEKKQGWTTVGDLEGCVHYKVVKYERIKFLVIALKSSVEVYAWAPKPYHKFMAFKSFGELVHKPLLVDLTVEEGQRLKVIYGSCAGFHAVDVDSGSVYDIYLPTHVRKNPHSMIQCSIKPHAIIILPNTDGMELLVCYEDEGVYVNTYGRITKDVVLQWGEMPTSVAYIRSNQTMGWGEKAIEIRSVETGHLDGVFMHKRAQRLKFLCERNDKVFFASVRSGGSSQVYFMTLGRTSLLSW

SEQ ID NO: 127 - protein, 541 aa, Homo sapiens
MGSSEVSIIPGLQKEEKAAVERRRLHVLKALKKLRIEADEAPVVAVLGSGGGLRAHIACLGVLSEMKEQGLLDAVTYLAGVSGSTWAISSLYTNDGDMEALEADLKHRFTRQEWDLAKSLQKTIQAARSENYSLTDFWAYMVISKQTRELPESHLSNMKKPVEEGTLPYPIFAAIDNDLQPSWQEARAPETWFEFTPHHAGFSALGAFVSITHFGSKFKKGRLVRTHPERDLTFLRGLWGSALGNTEVIREYIFDQLRNLTLKGLWRRAVANAKSIGHLIFARLLRLQESSQGEHPPPEDEGGEPEHTWLTEMLENWTRTSLEKQEQPHEDPERKGSLSNLMDFVKKTGICASKWEWGTTHNFLYKHGGIRDKIMSSRKHLHLVDAGLAINTPFPLVLPPTREVHLILSFDFSAGDPFETIRATTDYCRRHKIPFPQVEEAELDLWSKAPASCYILKGETGPVVIHFPLFNIDACGGDIEAWSDTYDTFKLADTYTLDVVVLLLALAKKNVRENKKKILRELMNVAGLYYPKDSARSCCLA

SEQ ID NO: 128 - protein, 411 aa, Homo sapiens
MQCSWKAVLLLALASIAIQYTAIRTFTAKSFHTCPGLAEAGLAERLCEESPTFAYNLSRKTHILILATTRSGSSFVGQLFNQHLDVFYLFEPLYHVQNTLIPRFTQGKSPADRRVMLGASRDLLRSLYDCDLYFLENYIKPPPVNHTTDRIFRRGASRVLCSRPVCDPPGPADLVLEEGDCVRKCGLLNLTVAAEACRERSHVAIKTVRVPEVNDLRALVEDPRLNLKVIQLVRDPRGILASRSETFRDTYRLWRLWYGTGRKPYNLDVTQLTTVCEDFSNSVSTGLMRPPWLKGKYMLVRYEDLARNPMKKTEEIYGFLGIPLDSHVARWIQNNTRGDPTLGKHKYGTVRNSAATAEKWRFRLSYDIVAFAQNACQQVLAQLGYKIAASEEELKNPSVSLVEERDFRPFS

SEQ ID NO: 129 - protein, 1228 aa, Homo sapiens
MKGARLFVLLSSLWSGGIGLNNSKHSWTIPEDGNSQKTMPSASVPPNKIQSLQILPTTRVMSAEIATTPEARTSEDSLLKSTLPPSETSAPAEGVRNQTLTSTEKAEGVVKLQNLTLPTNASIKFNPGAESVVLSNSTLKFLQSFARKSNEQATSLNTVGGTGGIGGVGGTGGVGNRAPRETYLSRGDSSSSQRTDYQKSNFETTRGKNWCAYVHTRLSPTVTLDNQVTYVPGGKGPCGWTGGSCPQRSQKISNPVYRMQHKIVTSLDWRCCPGYSGPKCQLRAQEQQSLIHTNQAESHTAVGRGVAEQQQQQGCGDPEVMQKMTDQVNYQAMKLTLLQKKIDNISLTVNDVRNTYSSLEGKVSEDKSREFQSLLKGLKSKSINVLIRDIVREQFKIFQNDMQETVAQLFKTVSSLSEDLESTRQIIQKVNESVVSIAAQQKFVLVQENRPTLTDIVELRNHIVNVRQEMTLTCEKPIKELEVKQTHLEGALEQEHSRSILYYESLNKTLSKLKEVHEQLLSTEQVSDQKNAPAAESVSNNVTEYMSTLHENIKKQSLMMLQMFEDLHIQESKINNLTVSLEMEKESLRGECEDMLSKCRNDFKFQLKDTEENLHVLNQTLAEVLFPMDNKMDKMSEQLNDLTYDMEILQPLLEQGASLRQTMTYEQPKEAIVIRKKIENLTSAVNSLNFIIKELTKRHNLLRNEVQGRDDALERRINEYALEMEDGLNKTMTIINNAIDFIQDNYALKETLSTIKDNSEIHHKCTSDMETILTFIPQFHRLNDSIQTLVNDNQRYNFVLQVAKTLAGIPRDEKLNQSNFQKMYQMFNETTSQVRKYQQNMSHLEEKLLLTTKISKNFETRLQDIESKVTQTLIPYYISVKKGSVVTNERDQALQLQVLNSRFKALEAKSIHLSINFFSLNKTLHEVLTMCHNASTSVSELNATIPKWIKHSLPDIQLLQKGLTEFVEPIIQIKTQAALSNSTCCIDRSLPGSLANVVKSQKQVKSLPKKINALKKPTVNLTTVLIGRTQRNTDNIIYPEEYSSCSRHPCQNGGTCINGRTSFTCACRHPFTGDNCTIKLVEENALAPDFSKGSYRYAPMVAFFASHTYGMTIPGPILFNNLDVNYGASYTPRTGKFRIPYLGVYVFKYTIESFSAHISGFLVVDGIDKLAFESENINSEIHCDRVLTGDALLELNYGQEVWLRLAKGTIPAKFPPVTTFSGYLLYRT

SEQ ID NO: 130 - protein, 4 aa, Artificial Sequence
  adhesive motif
RGDS

SEQ ID NO: 131 - protein, 149 aa, Homo sapiens
VAARPPVSRMEPRAADGCFLGDVGFWVERTPVHEAAQRGESLQLQQLIESGACVNQVTVDSITPLHAASLQGQARCVQLLLAAGAQVDARNIDGSTPLCDACASGSIECVKLLLSYGAKVNPPLYTASPLHEASFPRLLSTLASTPWIN

SEQ ID NO: 132 - protein, 206 aa, Homo sapiens
MAANKPKGQNSLALHKVIMVGSGGVGKSALTLQFMYDEFVEDYEPTKADSYRKKVVLDGEEVQIDILDTAGQEDYAAIRDNYFRSGEGFLCVFSITEMESFAATADFREQILRVKEDENVPFLLVGNKSDLEDKRQVSVEEAKNRAEQWNVNYVETSAKTRANVDKVFFDLMREIRARKMEDSKEKNGKKKRKSLAKRIRERCCIL

SEQ ID NO: 133 - protein, 431 aa, Homo sapiens
MMRQRQSHYCSVLFLSVNYLGGTFPGDICSEENQIVSSYASKVCFEIEEDYKNRQFLGPEGNVDVELIDKSTNRYSVWFPTAGWYLWSATGLGFLVRDEVTVTIAFGSWSQHLALDLQHHEQWLVGGPLFDVTAEPEEAVAEIHLPHFISLQGEVDVSWFLVAHFKNEGMVLEHPARVEPFYAVLESPSFSLMGILLRIASGTRLSIPITSNTLIYYHPHPEDIKFHLYLVPSDALLTKAIDDEEDRFHGVRLQTSPPMEPLNFGSSYIVSNSANLKVMPKELKLSYRSPGEIQHFSKFYAGQMKEPIQLEITEKRHGTLVWDTEVKPVDLQLVAASAPPPFSGAAFVKENHRQLQARMGDLKGVLDDLQDNEVLTENEKELVEQEKTRQSKNEALLSMVEKKGDLALDVLFRSISERDPYLVSYLRQQNL

SEQ ID NO: 134 - protein, 672 aa, Homo sapiens
MGVGRLDMYVLHPPSAGAERTLASVCALLVWHPAGPGEKVVRVLFPGCTPPACLLDGLVRLQHLRFLREPVVTPQDLEGPGRAESKESVGSRDSSKREGLLATHPRPGQERPGVARKEPARAEAPRKTEKEAKTPRELKKDPKPSVSRTQPREVRRAASSVPNLKKTNAQAAPKPRKAPSTSHSGFPPVANGPRSPPSLRCGEASPPSAACGSPASQLVATPSLELGPIPAGEEKALELPLAASSIPRPRTPSPESHRSPAEGSERLSLSPLRGGEAGPDASPTVTTPTVTTPSLPAEVGSPHSTEVDESLSVSFEQVLPPSAPTSEAGLSLPLRGPRARRSASPHDVDLCLVSPCEFEHRKAVPMAPAPASPGSSNDSSARSQERAGGLGAEETPPTSVSESLPTLSDSDPVPLAPGAADSDEDTEGFGVPRHDPLPDPLKVPPPLPDPSSICMVDPEMLPPKTARQTENVSRTRKPLARPNSRAAAPKATPVAAAKTKGLAGGDRASRPLSARSEPSEKGGRAPLSRKSSTPKTATRGPSGSASSRPGVSATPPKSPVYLDLAYLPSGSSAHLVDEEFFQRVRALCYVISGQDQRKEEGMRAVLDALLASKQHWDRDLQVTLIPTFDSVAMHTWYAETHARHQALGITVLGSNGMVSMQDDAFPACKVEF

SEQ ID NO: 135 - protein, 6 aa, Artificial Sequence
  epitope tag HIS6
HHHHHH

What is claimed is:

1. A method of detecting an angiogenesis-associated transcript in a cell in a patient, the method comprising contacting a biological sample from the patient with a polynucleotide that selectively hybridized to a sequence at least 80% identical to a sequence as shown in Table 1.

2. The method of claim 1, wherein the biological sample is a tissue sample.

3. The method of claim 1, wherein the biological sample comprises isolated nucleic acids.

4. The method of claim 3, wherein the nucleic acids are mRNA.

5. The method of claim 3, further comprising the step of amplifying nucleic acids before the step of contacting the biological sample with the polynucleotide.

6. The method of claim 1, wherein the polynucleotide comprises a sequence as shown in Table 1.

7. The method of claim 1, wherein the polynucleotide is labeled.

8. The method of claim 7, wherein the label is a fluorescent label.

9. The method of claim 1, wherein the polynucleotide is immobilized on a solid surface.

10. The method of claim 1, wherein the patient is undergoing a therapeutic regimen to treat a disease associated with angiongenesis.

11. The method of claim 1, wherein the patient is suspected of having cancer.

12. An isolated nucleic acid molecule consisting of a polynucleotide sequence as shown in Table 1.

13. The nucleic acid molecule of claim 12, which is labeled.

14. The nucleic acid of claim 13, wherein the label is a fluorescent label

15. An expression vector comprising the nucleic acid of claim 12.

16. A host cell comprising the expression vector of claim 15.

17. An isolated nucleic acid molecule which encodes a polypeptide having an amino acid sequence as shown in Table 2.

18. An isolated polypeptide which is encoded by a nucleic acid molecule having polynucleotide sequence as shown in Table 1.

19. An isolated polypeptide having an amino acid sequence as shown in Table 2.

20. An antibody that specifically binds a polypeptide of claim 19.

21. The antibody of claim 20, further conjugated to an effector component.

22. The antibody of claim 21, wherein the effector component is a fluorescent label.

23. The antibody of claim 21, wherein the effector component is a radioisotope.

24. The antibody of claim 21, which is an antibody fragment.

25. The antibody of claim 21, which is a humanized antibody

26. A method of detecting a cell undergoing angiogenesis in a biological sample from a patient, the method comprising contacting the biological sample with an antibody of claim 20.

27. The method of claim 26, wherein the antibody is further conjugated to an effector component.

28. The method of claim 27, wherein the effector component is a fluorescent label.

29. The method of detecting antibodies specific to angiogenesis in a patient, the method comprising contacting a biological sample from the patient with a polypeptide comprising a sequence as shown in Table 2.
